United States Patent Application Publication US 2018/0148762 A1 - sequence listing, part 2

SEQ ID NO: 1 - DNA, 4988504 bp, Shigella sonnei 53G (residues 1,662,836-3,325,670 of 4,988,504)
acggtgtggtgctgcaaattggtggttctgaccagtggggtaacatcacttctggtatcgacctgacccgtcgtctgcatcagaatcaggtgtttggcctgaccgttccgctgatcaccaaagcagacggcaccaaatttggtaaaactgaaggcggcgcagtctggttggatccgaagaaaaccagcccgtacaaattctaccagttctggatcaacactgcggatgccgacgtttaccgcttcctgaagttcttcacctttatgagcattgaagagatcaacgccctggaagaagaagataaaaacagcggtaaagcaccgcgcgcccagtatgtactggcggagcaggtgactcgtctggttcacggtgaagaaggtttgcaggcggcaaaacgtattaccgaatgcctgttcagcggttccttgagtgcgctgagtgaagcggacttcgaacagctggcgcaggacggcgtaccgatggttgagatggaaaagggcgcagacctgatgcaggcgctggtcgattctgaactgcaaccttcccgtggtcaggcgcgtaaaactatcgcctccaatgccatcaccattaacggtgaaaaacagtccgatcctgaatacttctttaaagaagaagatcgtctgtttggtcgttttaccttactgcgtcgcggcaaaaagaattactgtctgatttgctggaaataatgcattaagtggaaagggggagtgagaaatcactccccctggtttttatacagggaacatgatgaaaaatattctcgctatccagtctcacgttgtttatggtcatgcgggtaacagtgcggcagagtttccgatgcgccgcctgggcgcgaacgtctggccgctgaacaccgttcaattttctaatcacacccaatacggcaaatggactggctgcgtgatgccgcccagccatttaaccgaaattgtgcaaggcattgccgctattgataaattacacacctgtgatgccgtgttaagtggctatctgggatcggcggagcagggtgaacatatcctcggtatcgtccgtcaggtgaaagcagcgaatccgcaggcgaaatatttttgcgatccggtaatggggcatccggaaaaaggctgtatcgttgcaccgggtgtcgcagagtttcatgtgcggcacggtttgcctgccagcgatatcattgcgccgaatctggttgagctggaaatactctgtgagcatgcggtaaataacgtcgaagaagcggttctggcagcgcgcgaactcattgcgcaagggccacaaattgtgttggttaaacacctggcgcgagctggctacagccgtgaccgttttgaaatgctgctggtcaccgccgatgaagcctggcatatcagccgtccactggtggattttggtatgcgccagccggtaggtgttggtgatgtgacgagcggtttactgctggtgaaactgcttcagggggcaacgctgcaggaggtcctggaacatgtgaccgctgcagtctacgaaatcatggtgaccaccaaagcaatgcaggaatatgagctgcaagtggtggctgctcaggatcgtattgccaaaccagaacattacttcagcgcaacaaagctctgaaatatcacatttcggcccacaacgacctgtgggccgatggctattactttaagccttccgctgacagcgcgtcttgtacttccggacgttcagccatacgttgcataaatgccgcaatgtgctctaacccttccagattcagtttcaccgcgtatgcccagcgcagaaccgtaaacagataggcatcagcaattgtaaatctttgcccgcagatccagtgctcatccttcagtgcctcgttcacatattgcagcttcttatccagctgcgcgcgaactgtcggtttgtactcttccggtgtatctgggcgaaacagaggtgtgaaacctttatgcagctcggtggcgatgtaattcagccattcgatggttttatagcgggaaatactgtttaccggtgccagcaactggcggtcggggacgctgtcggcaagatactgcataatcgctacgccttccgtcagcaaagtaccgtcatccagcagcaatgctggcacctgccccttagggttaacggcaaagtaatcgtcaccgttttcgagtaatgccagtcagttaagcaactgactggctctttttcggggctgtggggtatttccagggcctctcctttaccactctcgggaaggccctttcccttctcgtcggtaatttcacaagttgtcccatacttgcaagatcgcgcatcagctccggtatacgtcccggtgaagcgccctgcaatgtcatcagcattctcatcaccattccgcatgattctgagaaactcagttgattcggccagtaacctttcagatgttccgccattttaatcatctgatatctcaccagattataagccagtaagacaccccacagctcttgctccacaagctccggctttttacttctcagcgtcagcctgctcagttgcatcgtctgttttatctccctgtatcccagttcgatttcccagcgatgactgtacagatccgccatttctcctccggggaagcgcatggcgtccgtcatcgacgtcagcagatggcagacttttcctttgcgcgtcacggtcagcaggcgggctgtcacttcatttcccagtcccggccacttttttcgtgcctgcgggctggttttcagcttcaccagatgatcgcctttacccagttttctgagctcttcatattgcgctccctttctgagaggtatcatccagtggcggtgttctcccgccaggctccaggcatttaacagtcccagtgagtaataacctttatccattaacgtcagagtgttatcgccggtttgttctataagttgctcagcaagctcattttcgctgttcttcatcgtgccgaaggctgcagccgtcagcagatggctggtcagttccatctggcagaccattttgacctgcgggtagagcgccgggttcccggcatgtgtctggcgggggaaggctgcatcgttctctggtgtatccggtgtgcgccagaacacaccatcgatggccagcagggtcaggccgcaccagtgcggatgcggcgtggcgttatgccagagctgcgctgttttcgtgaacacgcggcggacagcctcacttcccaggcgctggcgggcctgaataacggcactgggggcaacgaaggggcgattgcccggcagcatgatgtccaggcgattcacaatctggtgaagaggttctttacgctcaagcgccatgccaacaatacaccagaccatcatttcgaggggaagacggcgcttgcgtagcgttacagtacctgattcggcaaggcaacgagagatgagttcggggtcgaggtaatcccccagagaagtcagtgggttacgcagagaatcgtaacgggataccagatcaagagcctgtccaatgtgcataaaaaaaaccggaaacaagtgagcgtttccggattcttacacagccactggatcggtcaactgatccttaactgatcggcattacaccgttttcgagacgttttttcattaaatccacactgacgagggtaaaatcctttccgctctcacgcagggtgatatgggaagcgagagagcaggcacccggtttgtagaacaatttcatcggtaactccttttgtctgtggtttaaagtatggtagtgcgttgctgaacaaaaaaaagccgctaacgaaaagttagcggcttgtaaaagagtttccctgaattttacgctacagcagctttcgccgctttgtctgcagcgtcatcctgcgtcatacggtgcagtttaggcgcggtcagcagcatcagtactgcaataatggcagtagcgacaccaatctgcaagaatacgcgaccataaacttccagtgacatcagcgggtcggtaacgttatccggcacagccatcatacccgcaacataaccaccaatcaggtttgcaccggcagtggtcaggaaccagctacccataatgaagcccatcagacgctgcggaacgagttgtgcaaccattgccagacccagaccagagatcatcagttccccgatgctctgcaggccatagcttgcgaccagccagcttacagacacgataccagcgtcagacgcgaatttcgcacccagcggcagaatcaggaacgcaccagaacacatcaccatgccgattgcaaacttggttggcatcggcagggtatcgcccatcttgttatagatagcggccagaatcggactaccgatgatgatccagaacgggttcagtgcctgatactgctcaggttctacggccagacccagaatggagtgctcaacgttacgaatcgcaaagaagttcagtgacgttggcatctggctgtacagcacgaagaagataatggcttcgagcatcaggatgaaggcaacgatcattttacgacgcgcagcacctttcatcgcgaaggcttctttaccgaagataaccacgataccgaaggcaacaacgcccagcgccatacgcgcaacttcctgattgtgcagcagccaggtggcgatagcgatcagtgccacaacaccaataatggtcagcagcaggttacggtagttgataggctcgaagtctggttttgaaccgtactgtttaacccagcgttggcagaaggcgaagttaacgatagtgatcagcaggcctacaacgctcaacgcaaacgcaacactccagccgtatttcgcggccagccacggcgtagcaatcatagagaagaaagagccgatgttgacggacatgtagtacatggtgaatgcaccgtccagacgcgggtcgtttttctcatagcatgtagaaagcagagaagatgggttagctttaaacaggccgttaccgaccgcaatagccgccatacccatataaacgataccggcgtcgtgaccagaccaggcaaccagagcataaccaatcgccagcacaatagcgccgagcataattacgcgtttagtacccagtaccttgtcacctaaccagccgccgatagcgaccagaccataaaccagggcactaaaggaagagaaaagggtgattgaatccgcttcagacatacccagttgtttaaccaggtaaacagccataattccttgtaggccgtaataaccaaaacgttcccataactcaatcgagaagatgagatagaacgccttcggttgtttgaaagcgttcaaactgacgctttcagttggtttttggtttgcagtggacacttttacctctttttttacatcccatattaacgggggggctttctcgcgttatgtctaaaaaacatacgcgcaattgttatagtgggaggggaaacggcaggtaatgttcactatcttgcactttcagacaagtcctttgtaataatctgttacatataactgaggcggggaattcaaccattccgggaaatgttatccagcgttaaatttttcaaaaaacgtaatggcagattttttcactgcactgagaggggggtgatggcttaacggcgatatgttctgctatttggcgtttttactagtgagatagtccagtttctgaaaaatagccagtgtaatgttttgtaggtcaatatttgttgcgtgtgtaaatttaaattattttaacctgattcttgcaatgtttttacattgcgacagcatcgtgatcttgatcacgaatgaatagaaaatttcgctattaaaaaaacaattaacctgcatttttggttatccgcaaacggattacctgatgataacgctaagcaatggcatcattcacgttaaaaagatgttttaaaagaggataaagaaaggttatcaatggggtaatcggtgttaccccttttcttcagatgtcaactttctctttgtattcacaaagatcttcaataatacaagagccacagcggggcttgcgggcaatgcaggtataacgcccgtgcaggatcaaccaatggtggcagtcgactttaaactctgccggaaccactttcagtagcttttcttctacctgttcgacgtttttccccggcgcaaattgagtacgattacaaacgcggaaaatgtgcgtgtcgacagcaatagtcggccagccgaatgcagtgtttaatacgacgttggctgttttacgacctacgccgggcagggcttcaagcgcagcacgatcttccggaacctcgccattatgctgctccagtaagatacggcaggttttgatgatattttctgctttgctgttataaagcccaatcgttttgatataggttttaaccccttcaacgcccagttcaagcatcgctgcaggcgtattcgccaccgggtaaagtttcgccgtcgccttattaacactgacatcggtcgcctgagcggaaagcagtacggcaatcagcaattcaaaaggcgaactgaaattaagctcggtggtgggatgaggattgttctcacgcaggcgagtgaggatctccaggcgttttgctttgttcatcagacattccctgtttcaccgtttggcaatgcacgttcggcagctgcttcagtacggcgctttttcattctttcatcaatcaggtattttcctgccagcatcagtcccaggccaataaatgcacctggtggcagcatcgccagcaggaaaggggagtcggtgtggaaaatctccacgcgtaatacttttgcccagctacctaacagcgcatctgcaccgtcaaacaatgtgccattgccgataatttcgcgtagtgaacccagcacgaacatggcgcaggttgcgcccataccaattgaaaagccgtccagtgccgaaagcgccggaccttttttggcggcgaaggcttcagcgcggcccacaacgatacagttagtgacaatcagcggaataaaaatccctaatgattgatacaggccaaaggcgtaggcgttgatcagcatctgtacagcgctgaccaccgaggcgatgatcatcacgtaaatgggaatgcggatctcggctggcgtccagtgacgcagcgtcgaaatggtcaggttggtcagcgtcagtaccagcgtagtcgcaagtcctaaacccagagcgttagtggcagtggacgtgaccgccaacagaggacaaaggccgagcaactggaccagcgcagagttgtttttccacaacccctgaacaataacgtctttaatttcgctcacgctttattctccacaggcaggaagttgagaaagttgtgccggtaacgtctgagcgtacaatccggcgcgttttaccgcattaaccaccgcgcggggagtaatcgtcgcgccggtgaactggtcgaaatcaccaccatctttcttcaccgcccagtgcgcatcatccgcaccactgatttttttacccgcaaaatgggtgatccagtcagaaaggcgcagttcgattttatcgccaagccctggcgtttcgtggtgctctgtcacgcgcgtgccaagtaccgtgccgttaaaatcggctcccaccagcagctgaatcgcaccggaatagccatctggcgcggttgcttccagaacggcggctaccggtttgtcatcctgtttggcgatgtaaacccgatgctcacctttacctaactctggcgcagttaccagatagcaactctgtgccagcgtattgttatagcgttcggctggcagcacctgatcaaataatgccttttgttgcagactggcctgttcagcaatcgtcgttttggtcatctggttgatggccgcagttaaccctgttgaacccgctgcaaatagcgctaacgtaatgccgtgttttcggatagttttcagcatggtttaccctttgcgatggccgtagacgcgcggacgcgtgtagtaatcgatcagaggaaccgtgatgttcgccagcaggacggcaaaagccacgccgtcaggatagccgccgaaactgcggatcaaccagactaataagcccgcaagcgcgccgaaaataagacgaccacgattggtcgtagaagcggtaaccgggtcagtcaaaataaagaatgcgccgagcatggtcgcaccagacagcagatgaatttgcggtgctgccagtgtttctggtgagaacaaccagcccaacgttgcgcataacgccagcgttactaagaagctgaggggaatatgccagcgaatcgctttctgccatagcaaccacaggccgccagccagccaggcgagatttacccattgccaaccagcgcccgccagaataccgctgtagatcggatattgcataatctgttcaaccgaatgaccggcacggacagaggttttaaatgtatccagcggtgtcgcctgactaatgccatcaatacctaagcgtagtgtgttcatatcaccaccactggcggtatgcccgctgaaaataacctgtatggcgtcgataaaaccagggatgttgaccgcaatttcatgtggcggtaaccagctggtcatctgcaccgggaaggagatcagtaagaccacataaccaatcattgccggattaaacgggttttgccccagaccgccatacaactgtttagcgatgatcaccgcaaacaccgtacccagcacgaccatccaccatggcgcgagggggggaatacttaccgccagcaataagcctgtcagcaatgctgagttatctttcaacgttgcggctaccgactgcttgcgtagtttgagtacgagagcttcggctaacagagtactaaccgatgccaacaggatctgaacgagagtaccccaaccaaaaaaccacagttgcgctgcgattcctggcacggctgcgagcaacaccaacagcataatgcgcgatgtctggcgctggttatgggtataaggggagctagctattctgaataccatttagtcctcgtttacaaccttctgctgggcggcttttttggcctgagcgcgggcaatagccgcggcaactgccgctttgcgcggatcaacctgttcttctggttctgcgttagtctgttgctgttccagcttgcgcgctttggcacgggcaatagcggcttcgacggcggctttgcgcggatcaacctgttcttctggttccgcattagcctgttgctgttccagtttgcgcgctttggctcgggcaatagcggcttcgacggcggctttgcgcggatcaacctgttcttctggttctgcgttagtctgttgctgttccagcttgcgcgctttggcacgggcaatagcggcttcgacggcggctttgcgcggatcgacctgttcttctggttccgcattagcctgttgctgttccagcttgcgcgctttggcacgggcaatagcggcttcgacggcggctttgcgcggatcgacctgttcttctggttccgcattagcctgttgctgttccagcttgcgcgctttggcgcgggcgatagctgcttcaacggcagttttacgtggatcagcaacggttgctgcgtcgttagtttgctgcagttctgcctgtttcgctctggcttgcgctttacgggcttcccgtgctgcaataattgcactgttatccgggcgttcgcccgctttaatcacaataggctgtgtagcctgggcctgtttctctttcacccgcgccagagcggcagcaatcgcatctttatctttggctgcaggttgaacggctgcgctcttatgtcgttcaaggcgagccgctttttcgcgctccagacgagcctggcgcgcttcgaaacgcgctttggcttctgcggcgcgcttttcttcctgacgaatagccgcaatttcagctttttcctgacggaaatattgcaccaggggaatattgctcgggcaaacccacgcgcaagccccacattcaatgcaatcagcaatgttatgcgtggtagctttatcgtgttgctgacctttgctgaaccagtacaactgttgcggcaaaagatccgcagggcaggcgtcagcacaggcgctacaccggatgcagctttgttcttcctgtggttcgccaagttcattggcagagggagccaacagacagttggtaatctttacgaccgggacatccagccatggcaaggtaaagcccattagcgggccacccataatcaccatttgatcggcagaggggcagaatccggcatcattcaataaatgacgcactggcgtccccagccgtgcccagacgttgcccgggcgagcgattgcttcgccagtcagggttacaacacgctcggtaatcggctcgccatcaataacggcacgtttcactgcataagcagtgccgacgttttgcattaatacgccgatatcggatgaacgcccgccatgtggaacctgcttcccggtcagaatgtaggttaattgtttagcaccgccagaaggatatttggttggaatcacccgcagagaaatatcgttagagtccgccagcaccgcgcgcagcatggaaatcgcctgcggtttgttatcttcaatgccgataagaatttcgcgtggctgcagaatatgcgcaagaatgcgaataccctctacgacctgagccgcgcaatcctgcatcaaacggtcatcggcggtaatgtacggctcgcactcagccgcgttgataatcaacgtttcaatcttatctccgccaccctgcaatttaacgcctgtcgggaatcctgcaccgcccagcccggcaacaccaaactgatgtatgcgctcgattaactcttcgcgactgcgagtgcgataatcggcccagccgtcgcgcgggatccagcagtcttcaccatcggcatcaataatcacgcttaattcagctaaagctgaaggatgagccgtagagtggggcgcaatagccgtaacggtacccgaggtgggcgcgtgaacaggcagcattttgccgcgaccacgggtaagcggctggccgcgcaatactttatcgccgacgctaacgcacaactcaccttcagcgccaatatgctgtttcagtggaataacaaaacgctgcgccagtggtacctggcgcaggggtgtaccgttggactgggttttcatctccggtggatggatgccgccgttgaaatcccagattttattttttctgaatgcagagaataacttaagcatggtgttccacgggaatgatacgcacgggaatggtgttcagatcccatttccaggagtcaggtgtttctgcgaccggttgcaacgagatgcagtgcgtcgggcacggatcaacacataaattgcagcccgtacagagatcactcattaccgtatgcatggcacgggtagcgccaacgatggcgtctaccggacaagcctgaatacatttagtgcagccaatacagttattttcatcaataaccgccaccatccgcgcaggcgttagctcttgcgcttcgccatccagcggctgcggctcgacattaagcaactcggcaatttttagcatcacagcttcgccacctggggcgcaacggttgattttttcaccgttacagctgatggcttccgcgtaggggcgacagccgggataaccgcactgaccacactggctctgcggtaagatttcgtcaattttctcaacgaccggatcgtcttccaccgcaaaacggcgggaggcataacccagaatggcgccaaacgccaggcccagcaggctcacggcggcaacggcaatccagatagcattcattacaacttcaccaaaccattaaagcccataaaggccagagacataagacctgcggtaattaacgcaatggcattaccgcgaaaaggtgccgggacatcagccacagcaaggcgttcgcggatggcggcgaagagcaccatcaccagcgagaaaccgacagcggcggaaaaaccgtacagcgccgactgcaagaaattgtgcccgagattgatattcagcaacgccacgccgagcactgcacagttggtggtgataagcggcaaaaaaatccccagcagacggtaaagcaccgggctggttttgcgcaccaccatctcggtgaactgcacgaccacagcaatcaccagaataaatgccagggtgcgcaggtaaatcagattaagtgggatcaaaatccacgtatcgataagccaggcgcaaatagacgccagcgtcatcacaaacgttgttgccagccccatgcccatcgcggtttccagttttttggaaacccccataaacggacagagaccgagaaacttgaccagtacaaagttattgaccagtacagttccgacaaacagtaacaggtagtcagtcatttttcggcctgaaataaaaaagccgcctattatccgttaatccagagcaggcgacaacaggttaactgtaaggttattacggattcacaaacgtcgcttttacccgcgacgagcgtttgaaataggggacgatcaatgcggttgccaacaaagtaaacagcaactggcgaacggctatgccatcttccacgggtgaaaaagcgaatgcttttactgccagcaatacggaaataagcagccagataatatagtgtttaggaacacaacgccgacgtttaaagaaagcgatggtcaaccacagtgtgtaataccacatggcgatagcggtaataaaagaaacgccccataagatttgtgtcgtcagtgcttgtccgccgagcgtttgaaatgtttgcggagaagataacgcagcggtatacagcaacaacgccagcgtcgtactcaacagagcgactaaaagccaagccaacgggccaagcaaccagcctccaatacgttgtggcgttgtggtggtcataggttctccagaatagcgacgcaaacaggcaaatctaattttaggggcgttattataaggcttttataaccgatcgctactttctttattggacatagtgccagacggacttcggtacctggccgaggtcaaacaaacgcccgccagaaaccagctctgcgcgacggtgatcggcagcacgatacatattgatcagttcctgatcgtccgtcagggtgtaattaagatggtcgtagagtttttccagactttcgagtgaactgattttgcgaaattttaataagtagtcctgaacagtcataaaaggtccataaaataattaataccaaaggggtagagtgatgataaaatttcaccaaaagtgaacgcttgtgttattacaataataagaatgcgctgatggcaaatattcagggatgaaaaactgctctgaaaagagtaacgcgctttactatccctgacaatcaccaacaacatcgaacaagataataaattcctggtttaatatccgacaagtgaaaacatgcacccggacgggcagcatgtcgctccacaagtgcagagcttacttgtgttgtaccgaagcactctgttcaggtggctgatagttgtcaatgtgactcgccacgccaagaagaatgactgaaacgacaagaacgatccaacctgttaattcaataagacgattcattacagcccacatctctcttgattgatccattaacttcagggggtaaatgttacttagcaataatagctccagcaagatttttactgaggtttttgcgatatttagcttttgtcgttggaaaattcgctattttttttgacttaagttaaacaacatcccttattgctggcaggttattaaactgttgagcgtgggtaaaggatagtgtcaaatagccatcatacttcaatgagaggcaatgacatgagcgacaacatccgtgttgggttgattgggtatggttatgcgagcaaaaccttccatgcgcccctgattgcgggcacgcccgggctggaactggcggtaatctccagcagtgatgaaacaaaagtaaaagccgactggccaacggttacggttgtctctgagccgaagcatctgtttaacgatcccaacatagacctgattgtcattcctacacccaacgatacccatttcccgttagccaaagcggcgcttgaggcgggtaaacatgtggtcgttgataaaccctttaccgtgacactgtcacaagcgcgagagctggatgcgctggcaaaaagcctggggcgtgtgctgtctgtattccataaccgtcgttgggatagcgatttcttgacgctaaaaggtttgctcgcggaaggcgtgctgggtgaagttgcttactttgagtctcattttgaccgcttccgtccgcaggtgcgcgatcgttggcgtgaacagggcggcccaggcagcggtatctggtacgatttagcaccgcatcttcttgatcaggccattacgctatttggtttaccggtcagcatgacggtagatttggcacagttacggcccggagcgcagtcgaccgattatttccacgccatcttgtcctatccacagcggcgagtcattttacacggtaccatgctggcagccgctgagtcagcacggtatatcgtgcatggatcccgaggcagttatgtgaaatatggcctcgatccacaggaagaacgtctgaaaaatggcgagcgtctgccgcaggaagactggggctacgatatgcgtgatggcgtacttacccgcgtggaaggtgaggaacgtgtcgaagaaacgctgttgacggtgcctgggaattatccggcttactatgcggcgattcgtgatgcgttaaatggcgatggtgaaaatccggttccggcaagctaggcaatccaggtaatggagttgattgagctgggcatcgaatccgccaaacatcgcgcgacgttgtgccttgcgtgaaaaatggatggtgcaaattgcaccatccatttttgttacttcgcggcgactttttctcgcagtgcgcgtttttcctctgcgctgaggaaagccatttccagaccattaatctgtgcctggcggatttgctcacgggataacccagcagctggcgcggcaacggtatattcgtgaatgatatccactccctgtacgccgggatcgtcagtgttaatgctggcacgaatgccatgctcaaggaacgttttcagcggatgtgcagccagctctgctacggtgctggtctgaatattggaggtcagacaggattcaataccaatttgttgctcggcgagaaaatccatcagcgcccgatcttcaatggcttttacgccatgtccaatacgctccgcacccagttcacgaatcgcctgccagatgctttccggcccggcagcttcgcctgcatggacggtaatatgccagcccgcatcacgcgcgcggttgaagtgagaaaggaacagacttcccgggaatccaagttcatcaccagctaaatcaagtgcggtaatctggtcacggtgggctaaaaaggcctccagctcttgctgacaggcggcttcgccgaaggttcggctcataatgccgataagcttcgcctgcacaccaaaggtgcggcaaccttcacgtacgccatcgatcaccgcttcgacaacacccgctacaggcagctgatgtgccattgccatgtagcctggtgaaaaacgcagctcgacatagtgcaggccgttacgggctgcatcttcaatgttttcaaatgccacgcggcggcaggcatcaagagaggcgagaactttaacgccccagtcaagtttggtcagaaagctcaccagatcgggttcgttggcaatgacctgaacgtggggaatcagtgtttccagggattgtgcaggaagcgagatattatactggcggccaagttcaagaatggtctggggacgaatgttgccatcaaggtggcgatggatatcagttaatggcagggtggtatcaatcatggtcgcactctttttctggatataaaagtgcgcaccattataaaaacaaagcagggtaaaaatccacgattgcgcaacgattttttacgttgcgcaattggggttagcgaacagcgcggatggcgtttattaatccagccacacctttttccagtttcgaacgtgggcagccggcattgagacggacaaaaccacgaccttcttcaccataggtataccccggcatgatcgcgactttttcttgctcgataagcgctttttgcaacgcgttgtcgtcaatattcaacggacgtagatcaagccaggccagataagtggattgcgggatctgccagttgagttcaggaaacgcggcgttcattttatctgagatatacgtcaggttatctttcagatagacgcgtaaggcatccagccacggtgcaccttgctgataggcggcgatatgggcagttaacgccagtaccgaaggggaagaaagcccatcacgtcctttcagtgccgataaataggcatcacggctgctgctattttctataatcccgtaagcaccggtcagcgcgggaatattgaaacttttcgatcccgacgtcagcaacgcccagtctccccgcgccacattactccagggaatatgcggctgctcgccccagaccatatccatatggatttcatcggaaataacccgcacatcatgacgctcgcacaggtcagccatgatctccagctcatcgcacgtccacactttcccggtaggattctgtgggctacacaggagcataattttacattctggtttcgccaaaacggcttccagcttgcccatatcgcaaaaccagccgtcagcctgcttctctaaagcaacgggcattactgtgcgctggttaccttcaatggccttgtaaaatgcgtcataggcgggcgtgtggatcaccacgccttcacctgtttcagaccactgacgaatcagttctgaaaccatatagatgacagaagggccatacaccaccgtctgcgtatcaattgcggtgtaatgctgggtggaaaaccagtgggcaatagccgcgagaaactcatcgtttttccagcggctgtagccaaatacgccgtgcatcaggcgctgattcagcgcctcgataatgcagggggcagtggcaaaatccatgtctgaaatcgtgaacggtaacaggtcagcagtgccgaaacggtcagcgacataatcccactgtgtacaccatgtgccatgacgatccacgacctttgaaaaatcgaacatatcttatccttatgcctggacagtatgcatcagaccggccatttcatcttttactgactgaacttgtggcccgataacaacctgcaggttatgttgattaagttgtactacgccaattgcccgattgtccttcagtgcctgcacattaacaagcgacatatctttcacagacaaacgcagacgggtaatgcagttatcgaggctaacaatattgtcggcaccgcctaaggcttcgaggattgccggaacgttgtaacctgatttacccggcgcaccggcaacggctttttcgattgaactggccacttcgctatcgcgccccggggttttcagattgaagcgggtgatagcgaaacggaagatgacgtagtaaacgacaaaccagattgccgccaccactggcaccatgtaccacttggttgacagaccatgcaaaataccgaacaccacgaagtcgatgatattgccgtcggtattaccgatggtgacgccgagcacagacatgacagtgaagccgaggccggttaacagcgcgtggatgacatacagaactggcgccacgaacaggaacaggaattccagcggttcggtcgtgccgccaacgacacaggcgatcaggccagaaatcagcagccctttaattttatggcgattttccgggcgcgcgcagtgatacatcgctaacgctgcacctggcagaccgccgagaaacgcaggcattttgccttgcgaaaggaaacgcgtggcgctttcagaaaaaccgtgagtggtcgggcaactcaattgcgcctggaagatggtcaatgcgccgctgacggtttgaccgcagacttcctgcgtgccgcctgcgtcggtaaagcgaattaatgccaccagaatgtgatgcagaccaaacggcaacagcagacgttcaccggtaccaaacagcatcggtccgaaatcacccgcgctgtttatcatatggcccaagccgctaatacccatcgcgaaaatcggccagactaatggaatcaccaggccgacaaggcccatcaccagcgaggagatgattggtacgaagcgcgtaccgccgaagaatgcaagcgcatccggcaggcggatattatggaatcgctcatgcagcatccagacgataataccggcgatcaccgcaccgaggatcccggtgtcgatcgactggatcccaagaatgctctggatgttattggctttcagaaccgcggcgtccgtggttggcagaatgcctttattggtcaaccagaagtttaccgcgaggttcattaccgcataaccgacgaagccagcgaatgccgctacgcctttgttttcgcgtgccagacccagcgggatggcgatacagaacatgactggcaggaaactaaaagcaaacgagccaatcttactcatccaggtaaagatagcctgcaacacggggttgcccaggaccgggatcagggtgatgacatcgtggctactaagagaactaccaatgccgagcataatgccgcagaacgacaataatgccacgggtaacatgaaggttttgcctaactgctggaagaactcccacagcgtgactttcggtgctgttttcgccgtcataaaacgactcctcgtagagaacaatctggattcagtaaattgcgcgagaagataaaacgttttatcaaattttagtgaagcataaatcacattacgcaacgataatagcgggtataagataaataaaaggtaaaacgttttatctgtcacataatcagggagtaggtcatctgcatggctaccgccaaaaaaataaccattcatgatgttgcgctggctgcgggcgtgtcggtaagtaccgtttcgctggtgcttagtggcaaagggcgaatctctaccgccacaggagaacgcgttaacgccgccattgaagagctgggatttgtgcgcaatcgccaggcgtcggcgctgcgcggcgggcaaagcggcgtcattggtttgatcgtccgtgatttatctgcgccgttttacgccgaattgacggccggattgacggaagctctggaagcgcagggacggatggtttttttgcttcacggcggtaaagacggcgagcagctggcacagcggttttcactgttactgaatcagggtgtcgatggtgtggtaattgccggggctgcaggaagcagcgatgacctgcgacggatggcagaagaaaaagctatcccggtgattttcgcttcccgtgccagttatcttgatgatgttgatacggttcgcccggacaacatgcaggctgcacagttgttgacggagcatctcattcgcaatgggcatcagcggatcgcctggctgggagggcaaagttcctcattaacccgggcagaacgggtgggaggctattgtgcaactctactaaaatttggcctgccgtttcacagcgattgggtgctggagtgcacatccagccagaagcaagccgcggaagctatcacggcgcttttacgtcataacccgaccatcagtgctgtggtttgctataacgaaactattgcgatgggggcatggtttggtttgctgaaagcagggcggcaaagcggggaaagcggagtcgatcgttactttgagcaacaagtttcgctggcggcatttaccgatgcgacaccaaccacacttgatgatatacccgttacctgggccagcacgcctgcgcgggaacttggtaccacacttgcggatcgcatgatgcaaaaaatcacccatgaagagacgcattcacgcaatcttattattcccgcccggctcattgcagcgaaataatcctctctttatctgctatacctggtagtgtcctttcctcaaggttaatgataaaaaatgtggcacacaggcggtgtaatgccgatcagttaaggatcagttgaccgatccagtggctgtgtaagaatccggaaacgctcacttgtttccggatttttttatgcacattggacaggctcttgatctggtatcccgttacgattctctgcgtaacccactgacttctctgggggattacctcgaccccgaactcatctctcgttgccttgccgaatcaggtactgtaacgctacgcaagcgccgtcttcccctcgaaatgatggtctggtgtattgttggcatggcgcttgagcgtaaagaacctcttcaccagattgtgaatcgcctggacatcatgctgccgggcaatcgccccttcgttgcccccagtgccgttattcaggcccgccagcgcctgggaagtgaggctgtccgccgcgtgttcacgaaaacagcgcagctctggcataacgccacgccgcatccgcactggtgcggcctgaccctgctggccatcgatggtgtgttctggcgcacaccggatacaccagagaacgatgcagccttcccccgccagacacatgccgggaacccggcgctctacccgcaggtcaaaatggtctgccagatggaactgaccagccatctgctgacggctgcagccttcggcacgatgaagaacagcgaaaatgagcttgctgagcaacttatagaacaaaccggcgataacactctgacgttaatggataaaggttattactcactgggactgttaaatgcctggagcctggcgggagaacaccgccactggatgatacctctcagaaagggagcgcaatatgaagagctcagaaaactgggtaaaggcgatcatctggtgaagctgaaaaccagcccgcaggcacgaaaaaagtggccgggactgggaaatgaagtgacagcccgcctgctgaccgtgacgcgcaaaggaaaagtctgccatctgctgacgtcgatgacggacgccatgcgcttccccggaggagaaatggcggatctgtacagtcatcgctgggaaatcgaactgggatacagggagataaaacagacgatgcaactgagcaggctgacgctgagaagtaaaaagccggagcttgtggagcaagagctgtggggtgtcttactggcttataatctggtgagatatcagatgattaaaatggcggaacatctgaaaggttactggccgaatcaactgagtttctcagaatcatgcggaatggtgatgagaatgctgatgacattgcagggcgcttcaccgggacgtataccggagctgatgcgcgatcttgcaagtatgggacaacttgtgaaattaccgacgagaagggaaagggccttcccgagagtggtaaaggagaggccctggaaataccccacagccccgaaaaagagccagtcagttgcttaactgactggcattacacacaggcggtgccttttatttttactgaagttcacaggaggtttatgtgtttaattctgacaacttgagactctgaggtagcctgagtttaacggacactccttcctgaaatagaatggcatcagaaggagctaataatgagcagaaaaacccaacgttactctaaagagttcaaagccgaagctgtcagaacggttcttgaaaatcaactttcgatcagtgaaggcgcttcccgattatctcttcctgaaggcactttaggacaatgggttaccgccgccagaaaagggctcggtactcctggttcccgcacggtggctgaactggaatctgaaattctgcaactgcgtaaggcgttaaatgaagctcgccttgagcgagatatattaaaaaaagcaacagcgtattttgcacaggagtcgctgaaaaatacgcgttaatcgaacaatggcgacaacaatttcccattgaagcgatgtgtcaggtatttggtgtatccaggagcggttattacaactgggtacagcatgaaccctcagacagaaaacaaagtgatgagcggctaaaactggagattaaggtggcacatatccgcactcgcgaaacatatggaacccggcggctccagacggagctggcagagaatggcatcatcgttggtcgtgaccgactggcacgtcttcgtaaggagctaaggctacgctgtaagcagaaacgcaagttcagagcgactacgaactcgaaccacaatctgccagttgcgccaaatctgctgaaccagacgttcgctcctacagcaccaaatcaggtctgggtggcggacctgacgtatgttgccacacaggagggatggttgtacctcgctggcatcaaagatgtttatacgtgcgaaattgtcggctacgccatgggagagcgcatgacaaaagagctgacaggtaaagccctgtttatggcgctcaggagccagcgcccacctgccgggctaatccaccactctgatcgaggttcacagtactgcgcatacgattaccgggtcatacaggagcagtttggtctgaaaacatcaatgtcgcgtaaaggtaactgttacgacaacgctccgatggaaagcttctggggaacgctgaaaaatgagagcctgagccactatcgttttaataaccgggatgaagccatctcagtaatacgggaatacattgagattttctacaatcgtcagcgtcgtcactctcgtctggggaatatctccccggcagccttcagggaaaaatatcatcagatggctgcttaaaaaaagaacaaatggtagtgtccgctattgccagtacacctcactcgacggaaaatgcgccatcatcacaggtgcgggtgcaggtattggtaaagaaatcgccattacattcgcgacagctggcgcatctgtggtggtcagtgatattaacgccgacgcagctaaccatgttgtagacgaaattcaacaactgggtggtcaggcatttgcctgccgttgtgatattacttccgaacaggaactctctgcactggcagactttgctatcagtaagctgggtaaagttgatattctggttaacaacgccggtggcggtggacctaaaccgtttgatatgccaatggcggattttcgccgtgcttatgaactgaatgtgttttcttttttccatctgtcacaacttgttgcgccagaaatggaaaaaaatggcggtggcgttattctgaccatcacttctatggcggcagaaaataaaaatataaacatgacttcctatgcatcatctaaagctgcagccagtcatctggtcagaaatatggcgtttgacctgggtgaaaaaaatattcgggtaaatggcattgcgccgggggcaatattaaccgatgccctgaaatccgttattacaccagaaattgaacaaaaaatgttacagcacacgccgatcagacgtctgggccaaccgcaagatattgctaacgcagcgctgttcctttgctcgcctgctgcgagctgggtaagcggacaaattctcaccgtctccggtggtggggtacaggagctcaattaatacactaacggaccggtaaacaaccgtgcgtgttgtttaccgggataaactcatcaacgtctctgctaaataactggcagccaaatcacggctattggttaaccaatttcagagtgaaaagtatacgaatagagtgtgccttcgcactattcaacagcaatgataggcgctcacctgacaacgcggtaaactagttattcacgctaactataatggtttaatgatggataacatgcagactgaagcacaaccgacacggacccggatcctcaatgctgccagagagattttttcagaaaatggatttcacagtgcctcgatgaaagccatctgtaaatcttgcgccattagtcccgggacgctctatcaccatttcatctccaaagaagccttgattcaggcgattatcttacaggaccaggagagggcgctggctcgtttccgggaaccgattaaagggattcattttgttgactatatggtcgagtctattgtctctctcacccatgaagcctttgggcaacgggcgctggtggtcgaaattatggcggaagggatgcgtaacccacaggtcgccgccatgcttaaaaataagcatatgacgatcacggaatttgttgcccagcggatgcgtgatgcccagcaaaaaggcgagataagcccagacatcaacacgtcaatgacttcacgtttactgctggatctgacctacggtgtactggccgatatcgaagcggaagatctggcgcgtgaagcgtcgtttgctcagggattacgcgcgatgattggcggtatcttaaccgcatcctgatcctctcatttcgcgggctggtgataactgtgcccgcgtttcatactttaatttccctgtacaaaatacaatctagccgggatcggagaattcccccccaaaaatattcaccgtagccatatgtcatgagagtttatcgttcccaatatgctcgaacgaacgttcggttgcttattttatggcttctgtcaacgccgttttaaagattaatgcgatcaatatcacgctgtgggtattgcagtttttggttttttgatcgcggtgtcagttctttttatttccatttctcttccatgggtttctcacagataactgtgtgcaacacagaattggttaactaatcagattaaaggttgaccagtatttttatcttaatgaggagtcccttatgttacgtcctgtagaaaccccaacccgtgaaatcaaaaaactcgacggcctgtgggcattcagtctggatcgcgaaaactgtggaattgatcagcgttggtgggaaagcgcgttacaagaaagccgggcaattgctgtgccaggcagttttaacgatcagttcgccgatgcagatattcgtaattatgcgggcaacgtctggtatcagcgcgaagtctttataccgaaaggttgggcaggccagcgtatcgtgctgcgtttcgatgcggtcactcattacggcaaagtgtgggtcaataatcaggaagtgatggagcatcagggcggctatacgccatttgaagccgatgtcacgccgtatgttattgccgggaaaagtgtacgtatcaccgtttgtgtgaacaacgaactgaactggcagactatcccgccgggaatggtgattaccgacgaaaacggcaagaaaaagcagtcttacttccatgatttctttaactatgccgggatccatcgcagcgtaatgctctacaccacgccgaacacctgggtggacgatatcaccgtggtgacgcatgtcgcgcaagactgtaaccacgcgtctgttgactggcaggtggtggccaatggtgatgtcagcgttgaactgcgtgatgcggatcaacaggtggttgcaactggacaaggcactagcgggactttgcaagtggtgaatccgcacctctggcaaccgggtgaaggttatctctatgaactgtgcgtcacagccaaaagccagacagagtgtgatatctacccgcttcgcgtcggcatccggtcagtggcagtgaagggcgaacagttcctgattaaccacaaaccgttctactttactggctttggtcgtcatgaagatgcggacttgcgtggcaaaggattcgataacgtgctgatggtgcacgaccacgcattaatggactggattggggccaactcctaccgtacctcgcattacccttacgctgaagagatgctcgactgggcagatgaacatggcatcgtggtgattgatgaaactgctgctgtcggctttaacctctctttaggcattggtttcgaagcgggcaacaagccgaaagaactgtacagcgaagaggcagtcaacggggaaactcagcaagcgcacttacaggcgattaaagagctgatagcgcgtgacaaaaaccacccaagcgtggtgatgtggagtattgccaacgaaccggatacccgtccgcaaggtgcacgggaatatttcgcgccactggcggaagcaacgcgtaaactcgacccgacgcgtccgatcacctgcgtcaatgtaatgttctgcgacgctcacaccgataccatcagcgatctctttgatgtgctgtgcctgaaccgttattacggatggtatgtccaaagcggcgatttggaaacggcagagaaggtactggaaaaagaacttctggcctggcaggagaaactgcatcagccgattatcatcaccgaatacggcgtggatacgttagccgggctgcactcaatgtacaccgacatgtggagtgaagagtatcagtgtgcatggctggatatgtatcaccgcgtctttgatcgcgtcagcgccgtcgtcggtgaacaggtatggaatttcgccgattttgcgacctcgcaaggcatattgcgcgttggcggtaacaagaaggggatcttcacccgcgaccgcaaaccgaagtcggcggcttttctgctgcaaaaacgctggactggcatgaacttcggtgaaaaaccgcagcagggaggcaaacaatgaatcaacaactctcctggcgcaccatcgtcggctacagcctcggtgacgtcgccaataacttcgccttcgcaatgggggtgctcttcctgttgagttactacaccgacgtcgctggcgtcggtgccgctgcggcgggcaccatgctgttactggtgcgggtattcgatgccttcgccgacgtctttgccggacgagtggtggacagtgtgaatacccgctggggaaaattccgcccgtttttactcttcggtactgcgccgttaatgatcttcagcgtgctggtattctgggtaccgaccgactggagccatagccgcaaagtagtgtatgcatatttgacctacatgggcctcgggctttgctacagcctggtgaatattccttatggttcacttgctaccgcgatgacccaacaaccacaatcccgcgcccgtctgggcgcggctcgtgggattgccgcttcattgacctttgtctgcctggcatttctgatagggccgagcattaagaactccagcccggaagagatggtgtcggtataccatttctggacgattgtgctggcgattgccggaatggtgctttacttcatctgcttcaaatcgacgcgtgagaatgtggtacgtatcgttgcgcagccgtcattgaagatcagtttgcaaaccctgaaacggaatcgcccgctgtttatgttgtgcatcggtgcgctgtgtgtgctgatttcgacctttgcggtcagcgcctcgtcgttgttctacgtgcgctatgtgttaaatgataccgggctgttcactgtgctggtactggtgcaaaacctggttggtactgtggcatcggcaccgcttgtgccggggatggtcgcgaggatcggtaaaaagaataccttcctgattggcgctttgctgggaacctgcggttatctgctattcttctgggtttccgtctggtcactgccggtggcgttggttgcgttggccatcgcttcaattggtcagggcgttactatgacagtgatgtgggcactggaagctgataccgtagaatacggtgaatacctgaccggcgtgcgaattgaagggctcacctattaacatcgcgcacgttcttttttagccgccagttggcatgatgataccagtcgctattctctgggggcatcggtacagaaagatgtttccaatcagatacaaagtattctcgagaaaagcataccgctcgacccgaattatacgttgaaaggggagttgctcggcttttacgcgcagctcgaaggtttaagtcgtaataccagccagcccaatgaaacggcgttggttagtggacaattgacctggaatgcgccgtggggaagcgtatttggcagtggtggttatttgcgccatgcaatgaatggtgccgtggtggataccgacattggctatcccttttcattaagtcttgatcgtaaccgtgaaggaatgcagtcctggcaattgggcgtcaactatcgtttaacgccgcaatttacactgacatttgcacagattgtgactcgcggctatgaatccagtaaacgagatgtgcggattgaaggcgcgggtatcttaggtggtatgaactatcgggtcagcgaagggccgttacaagggatgaatttctttcttgctgccgataaagggcgggaaaagcgcgatggcagtacgctgggcgatcgcctgaattactgggatgtgaaaatgagtattcagtatgactttatgctgaagtcagaaataacgccggagagaaaaacctccggcgtttcagattgttgacaaagtgcgcgttttttatgccggatgcggcgtaaacgccttatccagcctacaaaaactcataaattcaaagtgttgcaggaaaaggtaggcctgataagcgtagcgcatcaggcaatctctggtttgttttcagatgaaaacgccgaagtgaaaattctccggcgttttggccgtgaattactgctgcggaattgccggtacagccggaacgttaagagctggcatcgcaaacataccaacgaaatcttccagtggcattttctgcccgtttaacgttatctgaccgttagtatattgcaggctggtggtgatggtattgtcctgcaaggtggtcagacggaacatctgccccattgctgatgcaccttcaacttgctgtttcgccagttttttcgcttgatcttcctgataaccttccagcttcgctacctgagtcataaactcagttgccatatccaccggaatggtcagtttcgcatccagagatttaaccgaacgatctacttcctgcgccagcgtttgcggcgcttctttagtcgttgccggatctttcaggaacagcgacagattcagcgcactttcaccctgactgtttttccagcttagcggcgcgatagtaatcaccggatcgcctttcaacatcagcggcagggcgctaaagaaggcttccgtcactttctcctgataaagttcgggattgttggcaatttctggctgtgccagcagcgcctgagtttgcgcgttatattgctggctaaactgatgccaggcttcaccatcaatctggccgacttttaaagtcagcttgccgctgcccagatcctgattctgtaccttcaggctgtttagcgagtaatccagttggctattgatcgttttaccgtcattgaccagatccgatttaccgctgatctccatgccttccagcagtgccagttctttgccttccactgaaatggtcattttttccagtgacagtttttggtttcctacgcgctcaccaaaacttgccagcgtgctggaaccgtcggttttcagattattaaaggtcaactgcactttctggttgtattcgttaactgcgtctatccgaccactttgcgcctccccggaaagggagatggctttgccgtctctgtcagcatttaactggaactcgccgccgctaaaggcgactttttcatccttttgctcgtaattcagtggcttgagcgaaatatcggaactggaatcaccgctgtaaccaatgcgcgagttaatctcaaaaggcgtttcaccttttgccatatcaaacagtggtttgcttacttcgttattaaccagcgtggtttgaattgatgccatcgacgggatcaggttcagttttttaagctgggcaagcgggaagggaccatgatcaaccgattcgttgaagatgacgctctgaccgcttttaatccacggattttctttcccggcaatgggtttcaccaacagttgcaactggctgctgaatacgccgcgatgatagttttgataactcacttccaggttggattcaggagctgtcagtttgagttgcgcgttcgcctgcgcgaccatgtcttcgagatgggtttcaatcttcttgcctgtataccatgcgccgcctgtccagactacgcctagcgcaacaatgacgcctaccgctaccagcgatttattcataatgattatccataaaatgaaatcaggcggactggccgcctgaaggtgttataagcctttaataagcttagcaagagatgttaattttttcagtaagctcttacagcttgttgtaaacacgcgctaaacggccgtggcctttgacagtcaccggtgattcgttggcggcaataaacgctgattcacccggtttaagctgtaactgctgagaacctttccacaacgttgcatcgccttcgacgcagaacaaaatggcggcactctgctggctaatggtggtttctttatcactaaggtcatgcagcgagaaggcaaaatcatccactggaatcgggaagtccagttctgcaccttgtttcaccggctgggtcaacaactggttagccggtttggcttcgaatttcacattggcaaccagttccggaatatcaatgtacttaggcgtcagacccgcacgcagcacgttatcggagttcgccatcacttccagcgccacgccttgcaggtaagcgtgcggtgtttcagcgaacaggaacatcgcttcgccaggattcaatttcaccacattcagtaacagcggggagaacaggccactgtcttccgggtaaaattcagaaattaaacgaatcgtttgccacggttcaccctgctgactgtcgagcgccgattttaaaatcgccagcgcgcgggatttttcttcaccctgcatattcaacaggctggcgaacagttcgcttaaacgttcggcattaggctgttgtaaaaagtgagcaattgccggatgtgcacctgcgactggctggagtagggagacaatctcggaaaactcacgaaacgcgttcatcgcaaggaaaggcgtcagcgcaaaaaccagctccggcttgtggttaggatctttatagttacgctcggcggcatccatcgggatacctgcggcattttctttggcaaaaccgatttcagaattgcgtttgtttggatgaacctgaatggagagcggctgtgctgcgcataatactttgaacaggaaaggcagttcgccaaagcgtttggcaacggcctctccgagcagagtcgatttatcactctcaatcacatcacgcagtgaaacgatatctccggcggcattctgcactcgtgaactgcttttcggatgtgcgcccatccacagctcggccatcggctggctggacggattttccataccataaagttcagtcaacgccgttttgctgccccaggcatagttttgcactgagttaatgagtttttgcatgatcaatccctgttttaatgtggaaattaatcccactattaaagcaagaatcctacgggaagtaacctggagccgcaaaaagtcgtactagtctcagtttttgttaaaaaagtgtgtaggatattgttactcgcttttaacagggcaacggaacacccgcccagagcataaccaaaccaggcagtaagtgagagaacaatgtcaaacaaaccctttcattatcaggctccttttccactcaaaaaagatgatactgagtattacctgctaaccagcgaacacgttagcgtatctgaatttgaagggcaggagattttgaaagtcgcacccgaagcgttaactctgttggcgcgtcaggcgtttcatgatgcgtcatttatgctgcgtccggctcaccaacaacaggtggccgacattctgcgtgacccggaagccagcgaaaatgataaatatgtggcgctgcaattcctgcgcaactccgacatcgcggcgaaaggtgttctgccaacctgtcaggataccggcactgcgattattgttggtaaaaaagggcagcgtgtatggaccggtggctgtgatgaagcggcgctggcgcgcggtgtctataacacttatatcgaagataatttgcgctactcgcaaaacgcgccgctggatatgtataaagaggtgaataccggcaccaatctgccagcgcagatcgatctttatgccgttgatggcgacgagtacaaattcctctgtatcgccaaaggtggtggttcggcaaacaagacgtatctctatcaggaaaccaaagcgttactaacgccggggaaactgaaaaattacctggttgagaagatgcgcacgctgggtacggcggcctgtcctccgtatcatattgcgttcgtaattggtggaacttctgcagaaactaaccttaaaacagtgaaactggcttccgctaaatactatgacgaactgccaacggaagggaatgagcacggtcaggcattccgcgatgtggaactggaaaaagaattgctgatcgaagcgcaaaatctcggtctgggtgcgcagtttggtggtaaatacttcgctcacgacatacgcgtgattcgcctgccacgtcacggcgcatcctgtccggttggtatgggtgtttcctgctctgctgaccgtaatatcaaagcgaagatcaaccgtcaggggatctggatcgaaaaactggaacataatccaggtaaatatatccctgaagagctgcgtaaagcgggagaaggcgaagcggtgcgcgttgaccttaaccgtccgatgaaagagatcctcgcacagttgtcgcagtatcccgtttctacacgcttatcgcttaacggcacgattatcgtcggtcgtgatattgctcacgccaaactgaaagagcggatggataacggtgaagggctgccgcagtacattaaagatcatccgatttactacgcgggtccggccaaaacgccggaaggttatgcctccggttctcttggcccaacgaccgccggacggatggattcttatgtcgatcaactgcaagcgcagggcggaagtatgatcatgctggcgaaaggcaaccgcagccagcaggtgacggatgcctgtaaaaaacacggcggcttctaccttggcagtatcggtggtccggccgctgtattggcgcagggaagtattaagagcctggaatgtgttgaatatccggaactgggaatggaagccatctggaaaattgaagtggaagatttcccggcgtttatccttgtggatgataaaggaaatgacttcttccagcagatacaactcacacagtgcactcgctgtgtgaaataaacagagccgcccttcggggtaatgccgatcagttaaggatcagttgaccgatccagtggctgtgtaagaatccggaaacgctcacttgtttccggatttttttatgcacattggacaggctcttgatctggtatcccgttacgattctctgcgtaacccactgacttctctgggggattacctcgaccccgaactcatctctcgttgccttgccgaatcaggtactgtaacgctacgcaagcgccgtcttcccctcgaaatgatggtctggtgtattgttggcatggcgcttgagcgtaaagaacctcttcaccagattgtgaatcgcctggacatcatgctgccgggcaatcgccccttcgttgcccccagtgccgttattcaggcccgccagcgcctgggaagtgaggctgtccgccgcgtgttcacgaaaacagcgcagctctggcataacgccacgccgcatccgcactggtgcggcctgaccctgctggccatcgatggtgtgttctggcgcacaccggatacaccagagaacgatgcagccttcccccgccagacacatgccgggaacccggcgctctacccgcaggtcaaaatggtctgccagatggaactgaccagccatctgctgacggctgcagccttcggcacgatgaagaacagcgaaaatgagcttgctgagcaacttatagaacaaaccggcgataacactctgacgttaatggataaaggttattactcactgggactgttaaatgcctggagcctggcgggagaacaccgccactggatgatacctctcagaaagggagcgcaatatgaagagctcagaaaactgggtaaaggcgatcatctggtgaagctgaaaaccagcccgcaggcacgaaaaaagtggccgggactgggaaatgaagtgacagcccgcctgctgaccgtgacgcgcaaaggaaaagtctgccatctgctgacgtcgatgacggacgccatgcgcttccccggaggagaaatggcggatctgtacagtcatcgctgggaaatcgaactgggatacagggagataaaacagacgatgcaactgagcaggctgacgctgagaagtaaaaagccggagcttgtggagcaagagctgtggggtgtcttactggcttataatctggtgagatatcagatgattaaaatggcggaacatctgaaaggttactggccgaatcaactgagtttctcagaatcatgcggaatggtgatgagaatgctgatgacattgcagggcgcttcaccgggacgtataccggagctgatgcgcgatcttgcaagtatgggacaacttgtgaaattaccgacgagaagggaaagggccttcccgagagtggtaaaggagaggccctggaaataccccacagccccgaaaaagagccagtcagttgcttaactgactggcattagtccccagggagacattttctcccgtagccagtatttttccattacgcattagagtgacacccactcccgatgcttttgttgcatcaggtgctgtgttagcaaacacttgtcggctactgtcagtggtggcacccgaaagataaaatgagagcttttgttcgcttgagcaatatacgccaaggggtatttctgcgcttccaggaaagtccgggagatccacagtgacattacgactatcaacggtgcagccgcctgttggcataacaacactgttatttgaaataatattccacgtaaaattacgcggatttccgcttcctaatgttgcaattttatacatatgaatacgggcaatgacttcccccgcttttatgacaactccaccggccgccccaactggggtaatatagagttttaacggtaatggcatcggtgtcttatcaccaatatccaatacgttggtatttgtcgtcaacgggaaggggtaggtcacattattccagtacagcgatcctttatatgactgtagggagcctgcgaaagctgagccttgtaccaggtttatatgatcagtgtcgtaccagccgccgtaatcattccagcaacttatatgctgagacaagtctacaaccagattctggcccggctgtattacagggtcgagattaacataaacagaggttgtacctgctccaatacttgacccgccatcgacattacaactgaaggcaaaaactttgcctgccattaatagaagataaataccgaacaggacctttatactgattgttttacccatgatatatcctaaggttaaaaattgatttaaaaagaaggctaagaaaatcgaatcgacgttattgccaggtgtagatcacattgattagcgcctcgatcgttccctagcttgcgtttccattcaccgtgatagctcttgccttaagtggaaactgtgcattacgagtgatctcatcaacaataaccgttttgctatcgccattttttaacgcagcatcctggtcatccctcagctctatctgaatattttcggcagtacctggatttgcccctatatttccagacatctgttattacttaacccattacaagcccgctgccgcagatattcccgtggcgagcgataacccagcgcactatgcggatgccattcgttataatgctcgaacgcctctgcaaggttctttgctgccgttaacccgtctggtttgggcatgatactgatgtagtcacgctttatcgttttcacgaagctctctgctattccgttactctccggactccgcaccgccgtgttcttcggttcaagtgtcaacgccacgatgtttgaccgttatttgccattttcatgcccgctaaatactttcgttactgatgctgtccgctttccaccatttcatcatcactgattggcgttgtgtttttggtcagcactccatggatttgcccctatatttccagacatctgttatcacttaacccattacaagcccgctgccgcagatattcccgtggcgagcgataacccagcgcactatgcggatgccattcgttataatgctcgaacgcctctgcaaggttctttgctgccgttaacccgtctggtttgggcatgatactgatgtagtcacgctttatcgttttcacgaagctctctgctattccgttactctccggactccgcaccgccgtgttcttcggttcaagtgtcaacgccacgatgtttgaccgttatttgccattttcatgcccgctaaatactttcgttactgatgctgtccgctttccaccatttcatcatcactgattggcgttgtgtttttggtcagcactccatggatttgcccctatatttccagacatctgttatcacttaacccattacaagcccgctgccgcagatattcccgtggcgagcgataacccagcgcactatgcggatgccattcgttataatgctcgaacgcctctgcaaggttctttgctgccgttaacccgtctggtttgggcatgatactgatgtagtcacgctttatcgttttcacgaagctctctgctattccgttactctccggactccgcaccgccgtgttcttcggttcaagtcccaacatccgggcgaactggcgtgtttcattagcccggtagcatgaaccattatccgtcagccactccactggagacgacggaagatcgttgccgaagcggcgttccaccgctcccagcatgacgtcctgtactgtttcactgttgaagccgccggtagtcaccgcccagtgcagtgcctcacgatcacagcagtccagcgcgaacgtgacacgcagtctctctccgttatcacagcagaactcgaacccgtcagagcaccatcgctgattgctttctttcacggccactctgcctgtatgtgcccgtttcgatggcggtacagcaggttttcgctcaagcaacagcgcattctggcgcatgatccggtaaacacgtttggcattgatcgcaggcataccatcaagttctgcctgtctgcgaagcagcgcccatacccgacgataaccatacgtgggcagctctccgataacatggtgtatacggagaagcacatccgtatcatcagtgtgacgactgcggcggccatccatccagtcatcggttcgtctgagaatgacgtgcaactgcgcacgcgacacccggagacaacggctgactaagcttactccccatccccgggcaataagggcgcgtgcgctatccacttttttgcccgtccatattcaacggcttctttgaggagttcattttccatcgttttcttgccgagcaggcgctggagttctttaatctgcttcatggcggcagcaagttcagaggcaggaacaacctgttctccggcggccacagcagtaagacttccttcctggtattgcttacgccagagaaataactggctggctgctacaccatgttgccgggcaacgagggagaccgtcatccccggttcaaagctctgctgaacaattgcgatcttttcctgtgtggtacgccgtctgcgtttctccggccctaagacatcaatcatctgtactccaatgactagtctaaaaactagtattaagactatcacttatttaagtgatactggttgtctggagattcagggggccagtctactccagctttacgtttctcttttaaccggtaactctctcctttgatattcagcgtggttgagtgatgtagcagccgatccaggatcgctgttgccagtacgtgatctccgaacatttctccccagtctgcgaaccctttgtttgacgtcagtatgatgctcgctttttcatatcgacggttcagtagccggaagaacagactggcttcctctctgttcatcggcagatagcctatttcatccaggatcaacacccgggcataactcagttgctgtagctgacgctccagccggttttcctgtttcgctttcatcagtgtcgcgatcagtctgtccagtggcataaacagtacccgatgtcccgcatccaccgctttcacgccaagagctatggccagatgagtttttccgacaccaggagggcccagcaggatcacgttttcgctgcgctccacgaacgccagaccagccagttcccggacaaccttacggtcgatgcccggctggaaggtaaagtcgaactgctccagcgttttgacccacggcagacgagcctgcttcagcctggactccataccgcgctgatgcctgccgttccattcctgctgtagcgccatgcacaggaactcccggtagttcagctcttttttagctgcctgttccagcaggctttcaacgtgataactcagatgctccattttcaggcgactcagcaggacttccagttcatgcatcacaacagctcctcataggcactcagtggtcgatgttccacctgactgacctgctgccagagcggggcgtgatgctccggcactgtctgccagccagacgatgctgaacagaggcgatgtgaggccaccagtttctcattactgtagatccgcaactcgtcatccagcgatattcgtatcgataccggctgaccacacagcgcttcgggaacgctgtaacgattaccaccaacctcgatatagctgtcccaggacacatggcggatatcgaagtaactggtatcgaagtctgtatccggtaacggctgcagatgttcctgctccagcgcgaagcgctgttccggcgtttctttgaactggcgaagctcccgtttgtcagccacatcggctatccattgctccagttgttgattgacatgagtgaagctgtcgaacctgcggtaccggacgaagaagttctccttgaggtatttcaccatccgctcaaccttaccttgaggtagcctgagtttaacggacactccttcctgaaatagaatggcatcagaaggagctaataatgagcagaaaaacccaacgttactctaaagagttcaaagccgaagctgtcagaacggttcttgaaaatcaactttcgatcagtgaaggcgcttcccgattatctctttgaggtgtactggcaatagcggacactaccatttgttctttttttaagcagccatctgatgatatttttccctgaaggctgccggggagatattccccagacgagagtgacgacgctgacgattgtagaaaatctcaatgtattcccgtattactgagatggcttcatcccggttattaaaacgatagtggctcaggctctcatttttcagcgttccccagaagctttccatcggagcgttgtcgtaacagttacctttacgcgacattgatgttttcagaccaaactgctcctgtatgacccggtaatcgtatgcgcagtactgtgaacctcgatcagagtggtggattagcccggcaggtgggcgctggctcctgagcgccataaacagggctttacctgtcagctcttttgtcatgcgctctcccatggcgtagccgacaatttcgcacgtataaacatctttgatgccagcgaggtacaaccatccctcctgtgtgtttaccggatcatgcgccagaatgcgctgttgcttgagcgaaaacctgctgtaccgccatcgaaacgggcacatacaggcagagtggccgtgaaagaaagcaatcagcgatggtgctctgacgggttcgagttctgctgtgataacggagagagactgcgtgtcacgttcgcgctggactgctgtgatcgtgaggcactgcactgggcggtgactaccggcggcttcaacagtgaaacagtacaggacgtcatgctgggagcggtggaacgccgcttcggcaacgatcttccgtcgtctccagtggagtggctgacggataatggttcatgctaccgggctaatgaaacacgccagttcgcccggatgttgggacttgaaccgaagaacacggcggtgcggagtccggagagtaacggaatagcagagagcttcgtgaaaacgataaagcgtgactacatcagtatcatgcccaaaccagacgggttaacggcagcaaagaaccttgcagaggcgttcgagcattataacgaatggcatccgcatagtgcgctgggttatcgctcgccacgggaatatctgcggcagcgggcttgtaatgggttaagtgataacagatgtctggaaatataggggcaaatccaggcaataccatgaatcaccggagcgaaaccatgttgtctatcgggcaacatcgcttctgttgaatttattttgaggccacgaaagttcacactatcaaaaatatcgccatcggtataactatcacctaccgttaaccgtgagcgtaagggaataatgtcacgttcagccgacgtattgatatgctgccatttattgctgtcagatgaattgctactcccactgttataactccacgttgagttatcgcgtagtcgccaactaccaatgttgatgccactctgtaaattcaaatatgcatagtttgattttcctgcattatggttactacgattattaatagaattaccattaaaactatagtttagaagccctgcatttattccttcttcccacagatcaggagaaacatagccgcgagccattctgccaacataaatttgcggaacggagagtgacagatgttgctgaccaacatcaaactcagttgatgcgtcggccaaacgatcctgaagtggtgtgcatgcgctgttgtccggcacatgtttttctgccgaatgttctttattgtctaataacgctattttttttataccaagactgacaagaagatctgtactcaggcatgggatgagttctgcgttattatcatctgcaataaaagtaatatcggtaatgactccaacttattgatagtgttttatgttcagataatgcccgatgactttgtcatgcagctccaccgattttgagaacgacagcgacttccgtcccagccgtgccaggtgctgcctcaaattcaggttatgccgctcaattcgctgcgtatatcgcttgctgattacgtgcagctttcccttcaggcgggattcatacagcggccagccatccgtcatccatatcaccacgtcaaagggtgacagcaggctcataagacgccccagcgtcgccatagtgcgttcaccgaatacgtgcgcaacaaccgtcttccggagactgtcatacgcgtaaaacagccagcgctggcgcgatttagccccgacatagccccactgttcgtccatttccgcgcagacgatgacgtcactgcccggctgtatgcgcgaggttaccgactgcggcctgagttttttaagtgacgtaaaatcgtgttgaggccaacgcccataatgcgtgcagttgcccggcatccaacgccattcatggccatatcaatgattttctggtgcgtaccgggttgagaagcggtgtaagtgaactgcagttgccatgttttacggcagtgagagcagagatagcgctgatgtccggcagtgcttttgccgttacgcaccaccccgtcagtagctgaacaggagggacagctgatagaaacagaagccactggagcacctcaaaaacaccatcatacactaaatcagtaagttggcagcatcaccgtaatatcccgactagtcataaattcgtcgttcaaataaatgtcgacccgatatgtaccaggtggtgcctcgcgtcccttagtaaaggcgggtaatgactccaacttattgatagtgttttatgttcagataatgcccgatgactttgtcatgcagctccaccgattttgagaacgacagcgacttccgtcccagccgtgccaggtgctgcctcagattcaggttatgccgcttaattcgctgcgtatatcgcttgctgattacgtgcagctttcccttcaggcgggattcatacagcggccagccatccgtcatccatatcaccacgtcaaagggtgacagcaggctcataagacgccccagcgtcgccatagtgcgttcaccgaatacgtgcgcaacaaccgtcttccggagactgtcatacgcgtaaaacagccagcgctggcgcgatttagccccgacatagccccactgttcgtccatttccgcgcagacgatgacgtcactgcccggctgtatgcgcgaggttaccgactgcggcctgagttttttaagtgacgtaaaatcgtgttgaggccaacgcccataatgcgtgcagttgcccggcatccaacgccattcatggccatatcaatgattttctggtgcgtaccgggttgagaagcggtgtaagtgaactgcagttgccatgttttacggcagtgagagcagagatagcgctgatgtccggcagtgcttttgccgttacgcaccaccccgtcagtagctgaacaggagggacagctgatagaaacagaagccactggagcacctcaaaaacaccatcatacactaaatcagtaagttggcagcatcaccgtaaaggcggataaatcgacagattcagcaagatcattgcttaaaaaccgtggattaaaataatactctgcgtcaacgggaaataccgcagttgctaagccaagggcaatggtaagccgtgcaaagcgaggcagtattaacacctgatgcatacgatatgccttaaatgcggcacgaaaggctgtcattattaattccgattgagtttattattaattaggtcactggcttacttgccttaatacgcggagttaatgcaccgtaatcattgatcgtctgaaaactgatatccccggttgcagcatgcgggatatccaccgatacttcaccttttggcggcaccatggtgtttgggagattgctatttcctgctttcatatttgttacggtaatgaaatagggcgttggattaataagagtgagtttgctaccgctacgacgaaaccgaagcattgcaggcgcttcttcaggtgccattgccaggttcgtggggcgataaaacatttttatgcggctaataattgccagctgtaatgtattctcattcttctggtctttttccatagcaggaatagctttaacattcacccagaacaggctttcacggtcgcctggtaactgatgattagtagcgttgattatccgcagcgtattccagtgcgacagctgcgttggcaacggtgctatggcaagcaaagagcaataaaagtaacactgtcgccataaaggaaatagagtagggggtacgcgtagtttgcatctgatgcattctccatgtgttaagaggataagcgggaaaaccgttacatcagacaatcgattaatgttgctaatacattggcgagtcgccgggtttccagacttaatgcgtttgtaataaatgttggttctcttttaataggaaaaccttgctacaaagtaaatattttaaataacagtaagtttaactactgttgtttattgatagtttagatattatgtgatttttcatagcgctccaaatacaaaccactcctcattaataatgagattcacattggtgaattgctcgggtgtgcgtagccatgccacacacaccctgtttcaatttcagatgacgtatagccaccttaagattgaattatagatattgaactttgaaggtcgcatcagcgtttgcagtaccagctacggactgcccgagagcaatataacgagcctggaatggcagtatattcgtgccacgataacatctttaaatcacaaggacacctaatctgaacgaataacgactaccagaaaagcacttcgcatcactcagacatgatttaacataatatacattatgcgcacaaacataaaccaagggagaatccagtcgttggccggtcatgattgctcattaacaacgaccaaaccccatatctcacttactaccgtattctcggcttaaccgtccatgcaacctcaacacattggtttcaactgccgtcaccacgttctccggaaaatctgtcggtaatgaagtcttcacgttatccagtgctgccggaatcattctggcaaagtcacttaggatttcatgcatctgcacttccgggaatctcagcacctttgctgtcgccaaaaaatgtcgcggataaattttatcgattgccgtttttttgcctttggatgcgttaagccccattgccagtttgagatcgctgatgttattcccgtaccgccaaggaccggaaatgctgaaatgatgtcgtaaaatggcgtgagtcgataactgccgccagcctgaataaatacggagaagttttttgcatggccatccgttgcgccaatcaaccactggaacacttgaaacttcataaaatcatagcgatctttcagcgcctcgctggaccccatcaaaaacgccatgatccgcgcgatgcctgggcctccatctgattcatatttcaccgatgaaggtaaaccgaatgtctgacacatatcctcctgtggcaagcgaagtaaaaccgttcgctcagtattccaacgcctgtcaaaacgttcgaccgctaacgcgcgcacccttcccgctttaatgatttctgcgtccggaacattcaacccaagttctttcgccagcagcagacagtaatactcattatcaacgctttggctgagatcgagcgtcgcattgggctgcctgatttcgccaatcggtaatttaatgatgtgcgtcgtcggcgttattcctttcggaatgcaccagtcattgcctattctgagcagtgctgtcttctcctgtgcgccagcaaccgagatgcgaaagtcattttcttctctaatcatgcctagcgggatatctgctttataagccgttaatacttcttcaagtctggcttcagtaagcttttcccatgccattatcggacgcgttacggtttcgtcttcgggtattaacgtcacggcaccaacgctgtctcgccctatttctgacaacaaatcaaacggttgtctggatttggcatgataacgtttaacgatccggtcacgtacaatcgggctatcgggtaacaggttatcgaagaagttaaatacggcatcagaggtgatattccccctctgcaatggcagcgaaagtgacaacggtctggcataacggctggctaaccactccggtgcatacttaaaggtgtgcgcgccgttggctaacttcgttaactcgcctacccgctggttgttcatccaagtgacaagtttaggcattaccactccagatcttgctgttctgttgcttctggcgaggcatttttcgcgtcgcatagcgtcattgagagttcaagcgactgtaaaatcttaaaaaaggtcgtcagcgtggtattgtcagggttgttttcgaaattggaaatcgtcgcctgcttaatgccaatttttttcgccagctcgctctgcgtccagccattttgctggcgaaccagtttcattgcattcgccaattgcgttgggctatagatcttctgaaagctcatcatgtcatacgtccacagcaaatttatccgcttaaggggatattatcagttttatcctttagtgaggataaagtcaatctggaaacacatcttatccgctgtacgggataaacgctgcgatatccgcgatcgcggataaaagggaggctttaaaagccttttgaagttggcaatattaagccgcatgccatctcgacatgcggcttatacggtttaccagctatatttcactcccagcatgccctgagtatcgctatagcctttatcacctagttgcacaccgacattcccccacaggctaatgctgattggcgtagcctgccatcacgccaagatgccagcgatcctgcgcgttgctactccactgcgccaaatctccgcctaaatagctgcgcttaataccgctacacttttgccagcccatgtttgcctccggggaatgggctgacggtttccataaaatggcgaacttttttcaacagttgccacattgagctgcactgatgattacgcgttattgtgtcgtgaagtgcctgccatagccgttcaacatgattcacccatggcgagtaaaccggctgataaatgaccctgaacttcgggttctccttcagccagctctgtgtttcccggcttttgtggataatgtagttgtccacgatcagcgtgatggttttcgcccgacggtatgtcgctttaagccgcttcagcaggctgatgaacagcgccgaacttttgctgttgccgcccacacagctgactttacctgtcccgctgtgcagcgctccggccagataatatttttcattctgtcccggcgtgaccacccgtttttgctgtccgcgcagttgccagtccgcaccgattttgggattaagatggatatccacttcatcttcataaaagaccggatgctctgcgctgcattcgtccagtgctttatggattgctgccatcttttcatctttatgcgggtcacggatacgcagagttggcgcagcccttcgccacacaatccccgcagacggcaaccagcggcgaacggttccggcatttaactggcaaccggttatctcattgatttttattgccagcagttctgtactccagcgtgaacgctggtagccaaagtcgccgggagaatgttttaccagctcacgtaacagtgtgcagatatgctcaaacggccagcgacgggcacgcccggcaggtaatgatttcagtccctcaacacccgactgcgtgaaccagttaatccagcgtccaacagaggaacgggcgcagcagagcgttctggcaacgtcgctgacacggtcgccccggtgcagcatcagcatggcagtcagtctgcgggcataatttttatcgtgtgttttatggatggctttctgcatcaggcgtcgttcgtcacgggaaattggtgctatgatcggcattgctcagtccggttggtgatttgttttgatttggcgattgatcagatcgcacaatccgggctaagttccctcaaagtgatctactattccgcgcagctatttagctgcaatacatagcggttagcctgagtatttagctggccgtcaccggtcctgaaacgttcgtgccccccgacatgacgcatccacatactgcttgccgatccctgagaatgcagtgaatctgtatactgcggctcacccagacggtcgtgtaagcgatggctattttgccgacatatcggccgttgcgccataggctccgccatgttcggctaacgtcagcttttgcccaccatggatgttcagcgctttcagcccatagttaacgtacaaaccatcacctggtgcggtcgtgaggcggaatccataatcaccctcggcgaccaccgttccgttttgcgcaatgtgtaacgttttgtccgcttccacctcgtcgccctgtaaatcacgtaacgttaatgagccacccgacccaataaccgtttgcgccttcaccagttgaacgccgacatggctatcatcgtgttccagcaaattgagcgtcgtcagagggttattcgctatgggatcattccacggtttaggcacgtcgataagcacgtcgcccgtcccgtttacctgatagttacggcctttccaggtgtagtcacccgcgccgacaaccagcgtatcgacgctgatatatccctctgcaagcgtcgcagcaggaatatccgtatcgaaaatgagcgtaccgccattcatggccagtccaccaatggattgctctcccacgtttaccgatgtggtattttcactgtcagactgcaacatcgcgtgagtaagcgcagcggtgttgtcgcgttccagagtgaaggttctgtctttcagttgggcaacaccggcgaattcagtccctgttgcatgggtaaagccaaacatcttgtcgtaggatgacagctgcactcgcatcaagccatcgcctttgagcgcattggtcagcgtgtaatctcctgcactgttcgttgatgcgagaatgtcgagcgtaccggggcttgcaatggtgacttcactcgaacccatgcccgttaccccatctgccgtatgagacgcaatggtcaggaggccgtcattgaccagcgttttaccgctataagtattccctgcattgaacaccgtatggcctgcatcatggatcacttttccgtctttatcgtcacctgtaatcagcatatcgacctggtagccggcatcactgttattagtatgattaaagacaaaaacaccttcgccagaaccaaactctactttcgtcgcgttggttatatacccggcatctgccgccgcctcaccgtgagctgcaccaatgtttagcgttcctacagcaggttcaaaaacacctaagtaaacttctccaccttcgacattcagcgtgccgctattcgtcagggttaacgtacccgtaccagatgtccctacgtacatattgaatgtttcaagaagagagttctgcccatccaccctcacgtcgcccttacttttgtcattgagagctatctgtgtatcacgcgctttaactatacctccggtggtaatattcagttcacccgtgcctaatacaccgacctgtagcaattgtgcgttagtagatgatgtctttaaattccagagactgtccgttgaaatattaactatccccttaccggaggcatttcctccgataaatccatagcccgttgaattaagggtggcaccattactgacatttacgataccgctaccaaaattaccgacattgatacccacagtatcgaacgatgatgtcgcatccatcaggttcagtgtgccgataccgcttgctttatcgcccaaaaaagtaatattttgcgatacaaacttaccgccatcgctaatattgaggtttccgacgcccgcaacaccaatggtggtatagacattcttattgacctcccacatcccccccgtggtgatgctgacattcccgacgccgttttctccataaccgagtgagcttcctccgttgctgacaacaagcccctcattactgatattcatttcgccgtggccgtcataaccaagattagttccgagattagtgataacggagttcttatccttaacagtaatgttgcctgtgcctgtttctttcatccccgcagtgataattcccgaatctactttaccttcacgcgagacattaagttcaccgtcaccagcatcaccgatatagatatagcggaaagcttcgcctgttccgaggaaactccaatgccctttatcggtcacgttgacgacaccgtgggaaccgtcctgaacgcccaccaatgaatattctttgttattaatcagaccattattggaaatattgactgtgccattaccgaaatacccattatagagtctgcgtaccgtgatgacagagtcttgatcctgcacattcagggttccgataccggtggcattgccaccgataatcgtattttcagccgtaatcagcccaccctcgcgaatagtcgcctccccagctccttgattaccaatttgaaattcaattgaggaatcattattttttattagccactcgccacccttttcaacgataaccttaccattactgttcgcttgatatcctaaaatggcgactattgaactcgtgacgtaacccttatccgtaatatttaatgagcccgtaccgtaactccctatttcgaataattcggtcgtcagaacagagtcttctccctcaacattgaccgtcccgacgcctcctgtcgaggaacctagtcttaaatagcctccatcaacgtgacctttctgtttaatattcagcgtccccgttccggattgacccacatttaaaggccttgcattatttccgctatcatacaatcgccaggtgccacccaaaacattaacggtaccctccgaatcctcattagcgccaatgacgctggtagtaatagtggttaagtaggcattaccgtcagccaaaatattaagaactccagtgccataccagccaaccaggtaggcatcataagcaacatcagtatcaatattggtaatctgaccattatcaacttccagactcgcaccagacgctgaaccgcttagtgccagcaaaacacccagcgtcaatctactgaatttcgttgtcagtccataggatttacgcaaattaactgttgatgtgcaaccgtgaaaatcaaaatagcataaattgtgatctattcgtcggaaatatgtgcaatgcccacctaaggggtaatgactccaacttattgatagtgttttatgttcagataatgcccgatgactttgtcatgcagctccaccgattttgagaacgacagcgacttccgtcccagccgtgccaggtgctgcctcagattcaggttatgccgctcaattcgctgcgtatatcgcttgctgattacgtgcagctttcccttcaggcgggattcatacagcggccagccatccgtcatccatatcaccacgtcaaagggtgacagcaggctcataagacgccccagcgtcgccatagtgcgttcaccgaatacgtgcgcaacaaccgtcttccggagactgtcatacgcgtaaaacagccagcgctggcgcgatttagccccgacatagccccactgttcgtccatttccgcgcagacgatgacgtcactgcccggctgtatgcgcgaggttaccgactgcggcctgagttttttaagtgacgtaaaatcgtgttgaggccaacgcccataatgcgtgcagttgcccggcatccaacgccattcatggccatatcaatgattttctggtgcgtaccgggttgagaagcggtgtaagtgaactgcatttgccatgttttacggcagtgagagcagagatagcgctgatgtccggcagtgcttttgccgttacgcaccaccccgtcagtagctgaacaggagggacagctgatagaaacagaagccactggagcacctcaaaaacaccatcatacactaaatcagtaagttggcagcatcacccacctaaggttatgaacaaattaaaagcagaaatacatttgttcaaaactcacctgcaaaactgaacgggggaaatatgcaaacgagtgatacccgcgcgttaccgctactttgcgcccgctcggtttataaacagtattcaggggtcaatgtcctgaaaggcatcgattttacgttgcatcaaggggaggtccacgccctgctcggcggcaatggtgccggtaaatcgacgttaatgaagattattgccggtattacccctgctgatagcggtacgctggagattgggggcaacaactacgtcagattaacgccagttcatgctcatcagctgggtatttatctcgttccccaggaaccgctgcttttcccaagcctgtcgataaaagaaaacatcctgtttgggctggcaaaaaaacagctctccatgcagaaaatgaagaacttgctggcggcgctgggctgctagtttgatctgcatagtctggcaggatcgctggatgtcgccgatcgccaaatggtggaaatcctccgcggcctgatgcgcgactcgcggattctgatcctcgatgaacctaccgcctcgcttacccctgcggaaaccgaacgcttgtttcgtcgcttgcaagagctgcttgctactggcgtgggtattgtttttatctcgcataagctgccggaaattcgccagattgccgatcgaattagcgtgatgcgcgacggaaccatcgccttaagcggcaaaaccagcgaactgtctaccgatgacattattcaggccatcacgccagtggtacgggaaaaatcgctctctgccagccaaaaattatggctggagttacctggcaaccgcccacaacatgccgccggaacgtcggtgctgacactagaaaatctgaccggcgaaggtttcaggaatgtcagcctgacgctcaatgccggagaaattctgggtctggccgggctggtgggggccggacgcacagaactggccgagacgctctatggtctgcgtactttgcgtggcggacgcattatgctgaatggtaaagagatcaataaattatccactggagaacgtttactgcgcggtctggtttatctgccggaagatcgccagtcatccggactgaatctcgatgcttcgctggcctggaacgtctgcgcccttactcataaccttcgtggattctgggcgaaaaccgcgaaagataatgccaccctggaacgttatcgtcgggcgctgaatattaaatttaaccaaccggaacaagctgcacggacattatccggtggcaaccagcaaaaaatcctgattgccaaatgcctggaagcttcgccgcaagcattgattgtcgatgagccgacgcgcggcgtggatgtctcggcccgtaatgatatctaccagctgttgcgcagcatcgccgcacagaatgtggcagtgctgcttatctcctctgatctggaagagatcgaactgatggcagatcgtgtgtatgtgatgcatcagggcgaaattacccactctgcactgaccgggcgcgatattaatgtcgagactattatgcgcgttgccttcggcgatagtcagcgtcaggaggcgtcatgctgaagtttattcagaacaaccgtgaaatcacggcactgctggcggtggtgctgctgtttgtattacccggttttctcgaccgccagtatttaagtgtgcaaacgctgaccatggtttatagcagcgcgcaaatcctgatcctgctggcaatgggcgcgacgctggtaatgcttatgcgcaaagtagtaagcgcgatgatatcttggataatactgagccgtgccagacaaaaatacggcgcagccagtgttgttgtggacgaacaatcatggttatcttcaggcgtgaaaaagtcgccctattaaacgtgattacgatcacattctcaagacgctacttacaaattacctacaagcttacaacattaacaggcgctgcatgtggcatctgttaatgataaaggcacataggatgttgtaactaatatagtgaaataagaaacccggtcaaaaccgggttcagaagtaacggtgttattagcacaacggacgtacagcttcgcgcatccctttttcaagaatcgcatccaggtcattagcaacctgctcgaccagaccaggcacttgcgtcaggtcctgctcccagtggtctttttctgccaacacaatcgctaccagttcctgggtaccgataacatggtcacgatgctggctccagagttgctgataacgttccagccagtgtgcatcgtcctgtaccggatatgtttctccgttacgctcaccacgatagaacgcaatcaatgccgctaatgcgaaagtaaggcgcgccggaagtgtgccgtttgccttctgccctgccagcagctgcggcaggatgcgggtgcggaacttggtcataccgttgagcgcgatagacagcagctgatgcttatacgggttacggaaacgcccggtgactgcactggcgaaagattccagttcatcacgaggcaaatccagtaccggaataatttcttcgtagatggctttttcaacgaatgcgcaaatttcagcatcgttcatcgcttcacctacggtatccagccctgcctggaacgccaccggcaccagcgcggtgtgcgcaccgttgaggattgccactttgcgttctttatacggtttaatatcgtcaacaatcagcacgttgagcggatatttgtccaggcgcagctcagtcgctaaggatttcggcccctgaatcacaaacaggtaaaagtgttcagcggtgtcgaggaaaccatcgtgataacccagttcttcttccagtttagccacttcatcgcgcggataaccggtaacgatacggtccaccagcgtagaacagaagctgttagcctgatccagccattgaataaatgcttctggcagtgcccactcttgcgcatagcgcagcaccagttcacgcaacgcgtcgccattgtagtcgatcaactcacacgggatgatgatccaacctttatccagcgcaccgttgaaatggctaaagcgttcgaacagcagacgggtcagttttgccggatagcttatcgctggcgcgtcatcgaatttatcgcccgcatggtagctgatccccgcttcggtggtgttagagaaaacaaagcgcatttccgggttgtgcgccagtttcaggaattcatcgtattcactgtagacgctgatttcacgattaaccgagcgaatcagacgcgcgtcgctgaccgcttcccccttctcattcaggccacggataatggtggtatacagaccatcctgcgtgctcagtgacggcgggaatgaagtttcaatcggacgaacaacgaccacgccagaattcagatcggtgtgctcattcaggagatcgatttgccagtcaacaaaggcgcgcaggaagttaccttcaccaaactgaatgatacgttctggatactgtgcaccgggaaaatcgcgacgatttagtgttttcacaatgggttcccttctgattagtcatacaacctgtttgaattggtacgacaggttagcaaactttaatacgccgaacccctgttttgatcaactcctgatgattaatgagcagttttatgagaaaagtgtggcgcggatcatggtttaatcgaggaaatacgccttttcctggatcataaagtggtagaacacattgcattcaaatcgcgcggaatgaataaagatgtcagacaacttcctcaccgtaacgcatagtgctggtacggttgcgcccatctttcttcgagcgatacagacacgtatcggcttcgaccatcaatttattaaaatcatcggtcagcgttcggtacgatgcgcgaccactaccgacgccaatacttaccgtgagataaagcgttttttgttgccaggtgaatggttgcagttcaacgcctttacggattttttccgccattagcagaccatcgacaggattcaccgacggcactgcaacagcaaattcttcgccgcccatgcgcgccaccagccccttatcaccgacaatcttctgaatatgccgggcaaacacgcttaacactttatcgccacattcatgtccatagttatcgttaatgcttttgaaatagtcgatatcaagcagcatgaccgtcagaggcacgatcaacacgcccgttgagaattgctcactgaaccagtccgcaagcaaaggccagaaatccagactatcaatactgaccgaaccaatcgccccgacaatagcgcataataatgcggcaatcagacagtaattaaatagccgtaaggcacttactggctcatacttatttttccccagacgcttatcccgcacgaccagtaaggcgacggtaacaataaacatcatattggagaaattgataaccagtgaaaccagtccccattcggtggttatggcatcataaaccagcatcgccacataactgatcgcatagtaatgcagtcgattaagccagacatagcgggcaaacccccccgccattacgccattcagcggccagaaaagagaaagttcgtgaaccagccgtaactctgcaccaataaaatagaacagcgtggttagcgcaaaaatagcgatgctattacgtagcagatgaccttcctggaacaaacggaaagttgaaatggggtgtacatgcattaattatctgtccatacaattgcgggtggcaattatctcaacgtaataagtaaattctcataaaggatagcatgttcgctaacagcggcggcaaataaaggtaccctgggaatgctattttatcgttttccgcaattctcatggctgattcatctgtacaaccagccagtgatagattaccgccacgatataacgttgttgttcttcgcttaacgaaacaccctgcggaatgttatgccacttagccagacaaccgcgacagcaggtcgcggtggcgtgctgagcgataaacaccggatgcccgcgcatgggggtttgcttaccgtcattagccggtaatgccggagcaagacgtttagcgacaaaatccgccgcatgttgttcgatgactggcgcgcctttctccaggcaatactgacgctctttcatgcccagacgaaagcgagagcgaaattttgaacgggataaacgcgcgaagagtggatcgagagactgcattaataaaccgaacgccctaactgtttcgtcaattgttcaaggacggcgatacccgcaagcgagttacctgcatcatccagttccggactccagactgcgatggccatttcatgcggaacaatcgccacaataccgccaccaacgccagatttcgccggtagtcccacccgccaggcaaactcccccgcgttctggtacataccactggtcgccatcagcgcgttaatttgccgcgcctgcattggcgtcactacaggttcatcaatatgaatagctttcccctgattagccagaaagacaaacgtccgagccagctctacacagctcattttcagagcgcagtaatgaaagtagttttgcagaacggttgtcacgtcatgatggaaattgccaaacgacttcatcagccaggcgatagccgcatttcgcgcggaatgttcaaattcggaacgcgctaccaccgtatcgtatgaaatatcagacacaccgcttaagccgcgcacgacttccagcatacgttgccgtggtgcgcttaatcgcccttgcaacatatcgcagaccaccagcgcaccagcattaataaacggattacgcggaataccctgttccatttccagttgcactaaagaattgaacggtgatccagacggatctttgccgacgcgttgccagatttcctcttcggagtaatgacgcatggcgacaacgagactcagcactttggaaatagactgaatggaaaaacgttcttgcgcgtctccggcctgaaaaagctgtccgtcaacggtacagatagcaatgcccaatcgggaaccgtctactgtagccagcgccggaatataatccgcgactttaccctgaccaatgagcggccgcacttgccgcaagatgttttctaaaattgcattatccatggcgactgccactttctactcctggaccgcaggtctgaaaagacctgcgagtatatcagagctgaatatgtcgcgtcagatccggtctttccacaccgtctggatattacagaattcgtgtaagccgaaatgggaaagctcacgaccaaagccactctttttcacgccaccaaaggccactcgcgcgtcgctggcacaataaccattgataaacaccccaccgcattccagacgtgccgccatctgtctggcctgtgtttcgtcggtggtaaaaatggtcgctgaaaggccgaactcactatcattagccagttccagcgcatgttctgcatctttcgcaacggtgattgccgcaacggggccaaacatttcttcccgaaacgcggtcatttctggggtaacattcgccagaaccgttggcggatagtagttacctgccccagccatcttttccccgcccagtaacaaacgcgcaccctgcgccagggttttctctacctgatgatgcagctcatcacgtaaatcaaaacgagccattggtccgagagtgttctcttcgtcacggggatcgcccattttcaaggctgccgcagctgccacaaaacgttcggtaaatgcagaagcaattccctcttcgataataaagcgttttgccgctgcacatacctgtccggtattctgataacgtccggctaccgccgctttaaccgccagttccagatcggcatcgttaagcacaataaacggatccgaaccgcccagttccagtacgcattttttcagtgccgctccagcctgtgcgccaatagccgctccagcacgaacacttccggtcaccgtgacagcagcaatgcgcgagtctttaatcatctgactgacaccgtcgttgtcggcattcagccagccatatacgccttgcgggattcccgcatctttaaacacctgggcaatgagctgagcacatcccatcacattcggcgcatgtttaagtaagtagccgttacctgcaagaatgatgggaacagcgccacgcatcacctgccataacggaaaattccacggcataatcgccagaatcgtccccaacggtcgatactcaataaccgcctgctgattttccaccagtgtaggttccgccttcagcattgccggaccatgttctgcataccagtcacacaaattcgccgatttcgccacttcagcgcgcgcctggttgattggtttgcccatttcgcgggtgatcatttgcgccatttcttcgctacgggcgcgcagagccttaccgatatcacgcattttttcagcacgataatctatatttgtctcgcgccagtcgcgaaagcctgctgccgccagctcaagtgcgttttcgatatcgttagcgccagcccacggcagcacagaaagttgttcacccgtggcaggatttattgaaattgcatgagttgccggagtaatggtcatcggggtatctcctttatgagtcatggtatgaagatacgcagatttactcttgctttaaaatgaataatattaagccacttattcacgaatcgagaatgttatggatctgacccaactggagatgttcaacgcggttgccgaagctggcagcattacccaggctgcagcaaaagtgcatcgcgtaccgtcgaatctcactacccgtctacgccagctggaaacagaactgggggtagatctgtttattcgcgagaatcagcgtttacgtctctctcctgccgggcataactttttacgctatagccaacaaattctcgcgttagtggatgaagcgcggagcgttgtcgctggcgatgagccgcaaggtttattttctcttggttcgctggaaagcaccgcagcagtgcgcattccggccacgctggcggaattcaaccatcgttatcccaaaattcagttttcactttccaccggcccttccggcactatgctggaaggagtgctggagggaaaactgaatgcggcatttattgatgggcccattaaccatactgccattgacgggataccggtataccgcgaggagctgatgatcgtcacgccacaaggtcatgcgccagtaatccgcgccagtcaggttaacggcagtaacatttatgccttccgcaccaattgttcgtatcgtcgccacttcgagagctggtttcatgctgacggtgccgctccgggaactattcacgagatggagtcgtatcacgggatgttggcctgtgtggtcgcaggagcaggcattgcgcttattccacgctctatgctggaaagtatgccggggcatcaccaggttgaagcgtggccgttagctgagcaatggcgttggttaacaacctggctggtctggcgtcgcggtgcgaaaacgcgtccgcttgaggcatttattcaactactggatgtgtctgactcggcaaaacagagttaccaatgaactattttgatagttcttgcggctaatatgctctatatagtgatgttccgatgacttatgactatatggggcaaatatggttacgccagtaagcatcagcaattacatatctcttcctgatgattttcccgttcgtaatattgcaccacaggtaaaagaagttttaaaggactttattgatgcgctaagtacaataatatgtgatgaagagtggcgcacgtctttaaacatcaactcagccacaaaaaagatatttaataaccttgataacttatcatatattcagaggacttctttccggggtaacgacacgctatacaatgaaaaggttcagtttaaactcacttatcccgtcaagaatggaagacacaaagaaaatattgaatttcaggtagtaataaatttaagccctatttatttagataattttcgccatgatggagaaattaatattttttgcgctcccaacccaaagcctgtcactatggggcgcgtatttcagaccggcgtcgagcgtgtgctctttctttttctgaatgattttattgaacaatttccaatgttcaaccctggcgttccgatcaaaatagcgcatacaccacatattgaacccctgcctccggatcaccataccgctgcagattacttacgccagtttgatttgcttgtcctgaattttatctctcgcggtaattttgtcatactcccccgattatggaataactctgaggttcacagatggttcgtcaataaagatcctaacttgatcaccgccattctcgacataacggacagcgaattaaaagaggatttattgcaaagcctgatggattcattaggttctaacaaacatgtactacccgaagtctgcatctgctttttattccttttagcagaacaagaatctcctcattttcaggacttgtttttatttttcgccaatatgttattgcactatcaccaatttatgaatcccaatgaaagtgatttgaatgacgtgttgatgccagcatcattaagtgatgataaaattatcaagcatatggcgcgcaggaccctcgaactgtttgtaaaaaatgaaacaccgccaaaagttactcacgaagacctggtgaaaaacaggcctcgctcccctgtcagaccacctatacccgcaacctccaaaacgccagacctccctgaacgtcattaaaccgtgatgttaccgactctctgacgcggaacagaatcagcgtcagagaaacggaaaacgcgatccagatcacaaatacattgtattcacatcattaaccgttttaagatcatttcatcactttttcgcaactcacccgataatctgttatgacaacaaacactgtttcccgcaaagtggcgtggctacgggtcgttacgctggcagtcgccgccttcatcttcaacaccaccgaatttgtccctgttggcctgctctctgacattgcgcaaagttttcacatgcaaaccgctcaggtcggcatcatgttgaccatttacgcatgggtagtagcgctaatgtcattgccttttatgttaatgaccagtcaggttgaacggcgcaaattactgatctgcctgtttgtggtgtttattgccagccacgtactgtcgtttttatcgtggagctttaccgttctggtgatcagtcgcattggtgtggcttttgcacatgcgattttctggtcgattacggcgtctctggcgatccgtatggctccggccgggaagcgggcacaggccttgagtttaattgccaccggtacagcactggcgatggtcttaggtttacctctcgggcgcattgtggggcagtatttcggttggcgaatgaccttcttcgcgattggtattggggcgcttatcacccttttgtgcctgattaagttacttcccttactgcccagtgagcattccggttcattgaaaagcctcccgctattgttccgccgcccggcattgatgagcatttatttgttaactgtggtggttgtcaccgcccattacacggcatacagctatatcgagccttttgtgcaaaacattgcgggattcagcgccaactttgccacggcattactgttattactcggtggtgcgggcattattggcagcgtgattttcggtaaactgggtaatcagtatgcgtctgcgttggtgagtacggcgattgcgctgttgctggtgtgtctggcactgctgctacctgcggcgaacagtgaaatacacctcggggtgctgagtattttctgggggatcgcgatgatgatcatcgggcttggtatgcaggttaaagtgctggcgctggcaccagatgctaccgacgtcgcgatggcgctattctccggcatatttaatattggaatcggggcgggtgcgttggtaggtaatcaggtgagtttgcactggtcaatgtcgatgattggttatgtgggcgcggtgcctgcttttgccgcgttaatatggtcaatcattatatttcgccgctggccagtgacactcgaagaacagacgcaatagttgaaaggcccattcgggccttttttaatggtacgttttaatgatttccaggatgccgttaataataaactgcacacccatacataccagcaggaatcccatcagacgggagatcgcttcaatgccacccttgcccaccagccgcataattgcgccggagctgcgtaggcttccccacaaaataaccgccaccaggaaaaagatcagcggcggcgcaaccatcagtacccaatcagcgaaggttgaactctgacgcactgtggacgccgagctaataatcatcgctatggttcccggaccagcggtacttggcattgctagcggcacaaaggcaatattggcactgggttcatcttccagctcttccgacttgcttttcgcctccggtgaatcaatcgctttctgttgcggaaagagcatccgaaaaccgataaacgcgacgattaagccgcctgcaattcgcagaccgggaatcgaaatgccaaatgtatccatcaccagttgcccggcgtaatacgccaccatcatgatggcaaatacgtacaccgaggccatcaacgactgacgattacgttcggcactgttcatgttgcctgccaggccaagaaatagcgcgacagttgttaatgggttagctaacggcagcaacaccaccagccccaggccaattgctttaaacaaatctaacattggtggttgttatcctgtgtatctgggttatcagcgaaaagtataaggggtaaacaaggataaagtgtcactctttagctaaccttgcatcgcattgaccaaaacttgaaccgatttagcaaaacgtggcatcggtcaattcattcatttgacttatacttgcctgggcaatattatcctctgcaactaattacttgccagggcaactaatgtgaaaagtaccagcgatctgttcaatgaaattattccattgggtcgcttaatccatatggttaatcagaagaaagatcgtctgcttaacgagtatctgtctccgctggatattaccgcggcacagtttaaggtgctctgctctatccgctgcgcggcgtgtattactccggttgaactgaaaaaagtgttgtcggtcgacctgggagcactgacccgtatgctggatcgcctggtctgtaaaggctgggttgaaaggttgccgaacccgaatgataagcgcggcgtactggtaaaacttaccaccagcggcgcggcaatatgcgaacaatgccatcaattagttggccaggacctgcatcaagaattaacaaaaaacctgacggcggacgaagttgcaacacttgagcatttgcttaagaaagtcctgccgtaaacaaaaaagaggtatgacgatgtccagacgcaatactgacgctattaccattcatagcattttggactggatcgaggacaacctggaatcgccactgtcactggagaaagtgtcagagcgttcgggttactccaaatggcacctgcaacggatgtttaaaaaagaaaccggtcattcattaggccaatacatccgcagccgtaagatgacggaaatcgcgcaaaagctgaaggaaagtaacgagccgatactctatctggcagaacgatatggcttcgagtcgcaacaaactctgacccgaaccttcaaaaattactttgatgttccgccgcataaataccggatgaccaatatgcagggcgaatcgcgctttttacatccattaaatcattacaatagctagttgataacgtgacaacgtcactgaggcaatcatgaaaccactttcatccgcaatagcagctgcgcttattctcttttccgcgcagggcgttgcggaacaaaccacgcagccagttgttacttcttgtgccaatgtcgtggttgttcccccatcgcaggaacaaccaccgtttgatttaaatcacatgggtactggcagtgataagtcggatgcgctcggcgtgccctattataatcaacacgctatgtagttattgtcaggctctgatcacagagcctgacatctccgtaatatcttcctcaagtctcaaatattttcgccattgttggcgatgagatcccgataccagtaaaacgacgctttacgtatccgttccagcgttcccttcccttcgttgtctttatcgacataaatcattccgtagcgctttttcatttcccctgttccggcagaaaccaggtcaatgcagccccacggggtgtagccaattaagtcaacaccatcttcaactacggcttttttcatttcccgaatatgggaagcaaagtaatcaatgcgatagtgatcgttcaccgtgccgtcagcttgtctctggtcaaccgcaccaaatccattttcgacaataaacagcggcaactggaaatgatcccagaaccagttgagtgaataacgtagccctgccggatcaatttgccatccccattcggatgtatcgatataagggttgctgaccaaatctcgtggttcaacataatccagttgcgggttatcgggagaaaattgtgtcgtaaaagacatgtagtagctaaaaccgataaagtcgacacatccactggcaagaatcgcgttatcttctggtgtgatatcgaggttgaatcctttcctggcaaagtaattcagcatatgttgcggataatatccacgagcatgaacatcagtaaaccagtaacgacgatgcatcgctttcgtggccatcatcatatcgttgggtgcacacgtcagaggatagatggggcacatggcgatcatacagccaatgttaaattcaggattgatcgattttccagtctgtaccgccagggcactggcaactaactcgtaatgtaccgcctggtacattatttgttcgcgctcattgatatcttcctctggcgaatacaagataccggaattagtaaatggacacaggctttcgctgaaattcacctgattattgatttcgttaaacgtcatccagtactttactttttctttatagcgcgtgaagaccgttgatgcgaagcggataaaaaagtcgatcagcttacggtttcgccagccaccatattttgtcaccagatgataaggcatctcaaaatgcgaaagcgtcaccacaggttccattccttgcttcaggcattcatcgaacagatcatcataaaattgtaaaccctcttcattcggctcctgttcgtcaccttgcggaaagattcgtgtccaggcaatggaagttcgaaagcatttgaatcccatctcggcaaataactgaatatctgttttatagcgatgataaaaatcaattgcttcatgattgggataattaagcccgtcgataacgccttctgtcacttcacgcggcaccccgtgagcgccagcagtcatcacatcagcgatactgatgccttttcctccttcattccagccaccttccaactgatgcgcggctaccgcgccaccccataaaaaaccttttttaaatcctgacatacacaactccttaactaaaatagattaccaccagacttccgcctgggtaatgactccaacttattgatagtgttttatgttcagataatgcccgatgactttgtcatgcagctccaccgattttgagaacgacagcgacttccgtcccagccgtgccaggtgctgcctcagattcaggttatgccgctcaattcgctgcgtatatcgcttgctgattacgtgcagctttcccttcaggcgggattcatacagcggccagccatccgtcatccatatcaccacgtcaaagggtgacagcaggctcataagacgccccagcgtcgccatagtgcgttcaccgaatacgtgcgcaacaaccgtcttccggagactgtcatacgcgtaaaacagccagcgctggcgcgatttagccccgacatagccccactgttcgtccatttccgcgcagacgatgacgtcactgcccggctgtatgcgcgaggttaccgactgcggcctgagttttttaagtgacgtaaaatcgtgttgaggccaacgcccataatgcgtgctgttgcccggcatccaacgccattcatggccatatcaatgattttctggtgcgtaccgggttgagaagcggtgtaagtgaactgcagttgccatgttttacggcagtgagagcagagatagcgctgatgtccggcagtgcttttgccgttacgcaccaccccgtcagtagctgaacaggagggacagctgatagaaacagaagccactggagcacctcaaaaacaccatcatacactaaatcagtaagttggcagcatcacctgaacggagataatccctcacctaaccggccccttgttacagttgtgtacaaggggcctgatttttatgacggcgaaaaaaaaccgccagtaaaccggcggtgaatgcttgcatggatagatttgtgttttgcttttacgctaacaggcattttcctgcactgataacggatcgttgacacagtagcatcagttttctcaatgaatgttaaacggagcttaaactcggttaatcacattttgttcgtcaataaacatgcagcgatttcttccggtttgcttaccctcatacattgcccggtctgctcttccaatgaccacatccagaggctcttcaggaaatgcgcgactcacacctgctgtcacggtaatgttgatatgcccttcagaatgtgtgatggcatggttatcgactaactggcaaattctgacacctgcacgacatgcttcttcatcattagccgctttaacaataatgataaattcttcgcccccgtagcgataaaccgtttcgtaatcacgcgtccaactggctaagtaagttgccagggtgcgtaatactacatcgccgattaaatgcccgtaggtatcattaaccaatttaaatcggtcaatatccaacaacattaaataaagattcagaggatcagtgttgcgtaactgatgatcaaaggattcatcaagaacccgacgccccggcaatcccgtcaaaacatccatattgctacggatcgtcagcaaataaattttgtaatcggttaatgccgcagtaaaagaaagcaacccctcctgaaaggcgtcgaaatgcgcgtcctgccagtgattttcaacaatagccagcattaattcccgaccacagttatgcatatgttgatgggcagaatccattagccgaacgtaaggtaattcatcgttatcgagtggccccagatgatcaatccaccgaccaaactggcacagtccataagaatggttatccgttatttctggcttactggcatctctcgcgaccacgctgtgaaacatactcaccagccactggtagtgggcatcgatagccttattgagatttaacaagatggcatcaatttccgttgtcttcttgatcattgccactcctttttcacagttccttgtgcgcgctattctaacgagagaaaagcaaaattacgtcaatattttcatagaaatccgaagttatgagtcatctctgagataacattgtgatttaaaacaaaatcagcggataaaaaagtgtttaattctgtaaatcacctctgcattatcgtaaataaaaggatgacaaatagcataacccaataccctaatggcccagtagttcaggccatcaggctaatttatttttatttctgcaaatgagtgacccgaacgacggccggcgcgcttttcttatccagactgccgctaatgttgatcatctggtccggctgaacttctcgtccatcaaagacggccgcaggaataacaacattaatttcaccgctcttatcgcgaaaaacgtaacggtcctctcctttgtgagaaatcaaattaccgcgtagtgaaaccgaagcgccatcgtgcatgttttttgcgaaatcaacggtcattttttttgcatcatcggttccgcgatagccatcttctattgcatgaggcggcggtggcgctgcatcctgttttaaaccgccctggtcatctgccaacgcataaggcatgacaagaaaacttgctaatacaatggactgaaatttcatactaactccttaattgcgtttggtttgacttattaagtctggttgctatttttataattgccaaataagaatactgccaattgttataaggcatttaaaatcagcccactagctgtcaaatattcagagaatttgactcactaaagttaagaagattgaagagtcttaaacatgttttcagaataatcggatttatatgtttgaaaattattatattggacgagcatacagaaaaagcaaatcacctttacatataatagcgtggacaaaaaacagtgaacattaataaagataaaattgtacaactcgcagataccgacactattgaaaacctgacatccgcgttgagtcaaagacttatcgcggatcaattacgcttaactaccgccgaatcatgcaccggcggtaagttggctagcgccctgtgtgcagctgaagatacacccaaattttacggtgcaggctttgttactttcaccgatcaggcaaagatgaaaatcctcagcgtaagccagcagtctcttgaacgatattctgcggtgagtgagaaagtggcagcagaaatggcaacaggtgccatagagcgtgcggatgctgatgtcagtattgccattaccggctacggcggaccggagggcggtgaagatggtacgccagcgggtaccgtctggttcgcgtggcatattaaaggccagaactacactgcggttatgcattttgctggcgactgcgaaacggtattagctttagcggtgaggtttgccctcgcccagctgctgcaattactgctataaccaggctggcctggcgatatccccaggccagccattggtggtgtttatatgttcaagccacgatgttgcagcatcggcataatctgaggagccttaccgcgccattgtcgatgcaggcgttccagatcttcgctgttacctctggaaaggatcgcctcgcgaaaacgctgcccattttcacgcgttaatccgccctgctcaacaaaccactggtaaccatcatcggccaacatttgcgtccacagataagcgtaataacctgcagcatatccgccaccaaaaatatgggcgaaataactgctgcgatagcgtggcggtatagcaggaagatccatattttccgccaccagcgcccgcaattcaaaatcatcgacatcctgcattgcttcgttttcttccaggcaatgccagcgcatatcgagaagtgcggcgctaagcagttcgctcatctcataccctttgttgaacaggctggcattacgcattttctgttgcagttcgtcaggcattgctgccccgctctgataatgccgggcgtagcgagcgaatacctgcggatgcgttgcccagtgttcgttgatttgcgacggaaattcgacaaaatcacgcggcgtgttggtgccggaaagcgtggcataacgctggcgggcaaaaaggccgtgcagcgtatgaccaaattcatggaataaggttattacatcatcccagagtaacaacgcaggctcaccggcagcgggtttctgataattgcagacgttataaattaccggatgcgtttcattaagcgttgattgctcaacaaaattgcccatccatgcaccgccgctttttgaatcacgggcgaagaaatcaccgtaaaataacgccagccccacgccattatgatcaaaaatttcccacacccgaacgtcaggatggtagacaggaatatcaaaacgttcgacaaacttaataccgaagagctgattcgcggtccagaatacaccttcattcaacaccgtgtttaattcaaaatatggcttgagctgcgcttcatcaagatcaaatttctcccgccgtacctgttccgcataaaatgcccagtcccacggctgcgcgctaaacccgccctgctgcttatcgataaccgcctgtatggaggctaattcatcgctcgcacgttgacgcgccgctggaacaatttcccgcataaagttgagtgctgcttctggcgtttttgccatctgatcggcgattttccatgcggcataatgaggaaaaccaagcagtttcgcctgctgtgcgcgaatctctaccagacgttgaatgatagcgcgggtatcattgccatcatttttttccgctcgcgtccagcccgcaataaacagtttttcacgcgtcgcacgatcgcgcatttcggcaagcgccggttgttgggtggtattcagcagcggaatcagccatttgttatccagacctttctcgcgagccgcctctgccgccagcgcaatctcttgctcactcattcctgccagctgcgcgatatcgttcacaaccagaccgccggatttatttgctgccagtaatcgctggttaaactggctggtcagggtcgcagcttctgtattcagtacttttaattttgctttatcagcttgcgcaagtttggctccggcaaggacaaaacgttgatgaatcacctccaccaggcggatggattcactatcaagccccagggattcacggcgctgccagacagcatctacccgcgcgaataattcaccgttcagatagatatcattagccagttccgccagttcagcggaaaactgttcatcaagacgctgtaattcatcattggtatgcgccgcagtcatcgcaaaaaagacgctggtaacgcgggtaagtaattctccgctttgttccagtgccagaatagtattgttgaaatcaggcgtttgcgggttaagcgcgatggcagcaatttctgcccgcttttgctgcattccctcatcgaatgccgggcgatagtgatgattggcaatttgatcaaaatggggagccagatacggtagtgtgctttgcacaaggaaaggattcattgttgtcattttcttctcctgaacgcgagatgttccatagcgtaggcttactgataacggagtgcaatcttgcaaaccagtattacccgctcttaagcatcacgtgctatgttattgacacacaaaagcgttgaggaacagtgagatgatcgttttagtaactggagcaacggcaggttttggtgaatgcattactcgtcgttttattcaacaagggcataaagttatcgccactggccgtcgccaggagcggttgcaggagttaaaagacgaactgggagataatctgtatatcgcccaactggacgttcgcaaccgcgccgctattgaagagatgctggcatcgcttcctgccgagtggtgcaatattgatatcctggtaaataatgccggcctggcgttgggcatggagcctgcgcataaagccagcgttgaagactgggaaacgatgattgataccaacaacaaaggcctggtatatatgacgcgcgccgtcttaccgggtatggttgaacgtaatcatggtcatattattaacattggctcaacggcaggtagctggccgtatgccggtggtaacgtttacggtgcgacgaaagcgtttgttcgtcagtttagcctgaatctgcgtacggacctgcatggtacggcggtgcgcgtcaccgacatcgaaccgggtctggtgggtggcaccgagttttccaatgtccgctttaaaggcgatgacggtaaagcggaaaaaacctatcaaaataccgttgcattgacgccagaagatgtcagcgaagccgtctggtgggtgtcaacgctgcctgctcacgtcaatatcaataccctggaaatgatgccggttacccaaagctatgccggactgaatgtccaccgtcagtaatttttatacccggcgtaactgccgggttattgcttgtcacaaaaaagtggtagactcatgcagttaactcactcacaagcaagaacgaatgaccgtcgaaacgcaacttaatcccacacagcctgtcaatcagcaaatttatcgtattcttcgtcgcgacattgtccattgcctgattgcaccaggcacaccgttgtcggaaaaagaagtttctgttcgtttcaatgtgtcacgccagccggttcgtgaagcctttattaaactggcggaaaacggcctgattcaaattcgtccgcagcgtggcagctacgtcaacaaaatttccatggcccaggtgcgcaatggcagttttatccgtcaggccattgagtgcgcggtggcgcgtcgggcggcgagcatgattaccgaaagccagtgctaccaactggaacaaaatcttcaccagcaacgcattgccattgagcgcaagcaactggatgatttttttgaacttgatgacaacttccatcaactcctgacgcagattgccgactgtcaactggcgtgggataccattgagaacctgaaagcgaccgttgatcgcgtgcgctatatgagtttcgaccacgtttctccaccagaaatgctgttacgccagcatcttgatattttctctgccctgcaaaaacgtgatggcgatgcggtagaacgtgcaatgacgcaacatttgcaggaaatcagcgaatccgtgcgccagatccgccaggaaaatagcgactggtttagcgaagagtaattcatttcctctcatcccatccggggtgagagtcttttcccccgccttatggctcatgcatgtatcaaaaaagatgtgagcttgatcaaaaacaaaaaatatttcactcgacaggagtatttatattgcgcccgttacgtgggcttcgactgtaaatcagaaaggagaaaatacctatgacgacctacgatcgtaaccgtaacgcaatcaccactggcagccgtgttatggttagcggcaccggtcacactggcaagatcctgtcgattgatactgaaggtctgaccgctgagcaaatccgccgcggaaaaaccgtagttgttgaaggttgtgaagagaaactggcacctctggacctgattcgtctcggcatgaactaagcgtgtgaatgccgccgatggcggcattgctttttttacttcacggaatatttcgccacggtcgctttcgcgccatgcgctaataaagacaagtacgcttccgtcacttttgcagtaaacaaactattgtctggcaaatcatcaccaaagatcgccttaatcgccagcaatgactggacgcgcgctttcccttcagcactactttgtacagccttctgaataacaggtaacagtgggtcactgatttcaatcggatttccctgttcatcaacaccaccgacataacgcatccaacccgcgacgcccagtgccagcagatcgaacttgctgtcatgcgccagatgccagcgaacagaatccaacatccgctgtggcaatttctggctgccatccatcgcaatctgccaggttcgatgacgtaacgccgggttgctatagcgttcaattaatcggttagcgtaatcttgcaaatcaacgccctgcactttcagcgtcggcgcttgttcctgcaacatcaagccatacgccgcataacgataatgttcatcttccatgcagtcattaatgtgctgatatccagcaagataacccaaatacgccaggaatgaatgactgccgttgagcatgcgcaacttcatctcttcataaggcagcacatcactaaccagttcggctcccgctttttcccattctggacgtccggcaacaaagttatcttctattacccactggcggaaaggttcacaggcaacgcccgcaggatcgcccacaccggtaagttgttcgattttcgccagcgtatcctctgtcactgcgggcacaatacggtccaccattgttgatgggaaagtcacgttatcttcgatccattgtgccagttttacatcaacagctttcgcgtatgaagtgacaacgtcacgcataacatgaccgttttctggcatgttgtcacatgacatgacggtaaatgcgggaagtcctgccgctttacggcgggccagcgcctcaacaatcacccctgttgctgttttcggctggtggggattttgcacgtcggcagcgaccatcgggtgatcgagcattaactgtccggtcgccggagagtggaaataccctttttcggtgattgtcagagagacaatcgcgatttgcggttcacacatcgcagccaacacggtttctaagccatccatctgtacgtgcaaggctttcttaacgacgccaacgacgcgagccgtccacgcatcggccgacatttccgcaacggtataaagattatcttgctgttgtaaatcggcaatttgctgttcgccgccgattaagttgacctcataatatccccagtcactgaaatgttctgtagcaagaatatcggcatacacgccctgatgcgcacggtgaaatgcaccaaagcctaaatgaataattcttggggccaggttattacgatcataaacagggagtgtcgcttttgctgataacaaattatttcccataacaattccttaaatataaatatggcaagctatatgttttgttatatgggtaatgactccaacttattgatagtgttttatgttcagataatgcccgatgactttgtcatgcagctccaccgattttgagaacgacagcgacttccgtcccagccgtgccaggtgctgcctcagattcaggttatgccgctcaattcgctgcgtatatcgcttgctgattacgtgcagctttcccttcaggcgggattcatacagcggccagccatccgtcatccatatcaccacgtcaaagggtgacagcaggctcataagacgccccagcgtcgccatagtgcgttcaccgaatacgtgcgcaacaaccgtcttccggagactgtcatacgcgtaaaacagccagcgctggcgcgatttagccccgacatagccccactgttcgtccatttccgcgcagacgatgacgtcactgcccggctgtatgcgcgaggttaccgactgcggcctgagttttttaagtgacgtaaaatcgtgttgaggccaacgcccataatgcgtgcagttgcccggcatccaacgccattcatggccatatcaatgattttctggtgcgtaccgggttgagaagcggtgtaagtgaactgcagttgccatgttttacggcagtgagagcagagatagcgctgatgtccggcagtgcttttgccgttacgcaccaccccgtcagtagctgaacaggagggacagctgatagaaacagaagccactggagcacctcaaaaacaccatcatacactaaatcagtaagttggcagcatcaccccgccacagaacaattattgcttttgccgttgatgacaataaagtttttatcgcaggcgtataccacggtgggcaaatctatgaaaccgattttttatccagtgcaccgtaaaacccccatccttcagggcgtggcggatatcaaactttggtcattttctctggctgatctttaccggataaccatcccgaagatcaattaagtgctccggttcagaagcaaaccatgcataagatccccacgccaattctggtattgcctttttaaaaggcagagcacttctgtccataaatgccgtaaggaatgcaagatttttctcgctgaacccagcgtcaatagccaaatgagtgagagtaacttttcgttccctgtttataggcccatctgtcgcaactacttcagtgaaaactacaagcatgtccgaacccgttcggtcctctcccaaatcaatcaaaataatatctggaagtgcttttgaggcatcaatattcagccccaatgcttttgccaatacatcatcctgagcaacaactttattcccggattcagacaaccagagcacagttggattcttaagaaaattaggagcaaaaacttcgatgacggccttagctattgtacttgacgggcccggagctaaagttctcttctctccatttgggaaagtgacgactacggcatcagcagcaatcactgcccctgatttcaataaacgcaacctagcaagagcggctttgttcaaatgattttcttgccaggaacttattgcactcagcagcgaatctccttcaagcccggcatcaaagagtgctgcaaaagagcgattcaaactgtaacgaggacgagaggatgtggtgggtatacctttacgctcaacaattgcattgcaaggtattaggccattttttatagtttcatcacgtattggctcacgcgtattttccgcataccatgcatcagcaggccttatcttttgtttagagaaagtcatctttacccagctttctctggacgcatcatcagtaagagcagcctgcgaatctcccatacttacaacctggctgggccttatccatcgccccagcccctcaaccgcaccagcataaaacatgacaaaaattgtttttgcagctatttcccgaattaaatatccacgattctcagtcccttcagggaaaattaattgtaatctttcccggataacattcaatgggggaacaacaggcagattcatgcaatcatcactccatagaaaccagcgatagttctctcaataatccgtctgtggacgccagcatcaattaacgattgaatctccatcacctgctccagagaaggcaacgggattgaattcaattcataggccgaaacagcaacacttccgcttatacacctgaacgcccgatcgacaacatgcgaattaagtagcatatcaataacatcagggcgaaccgcagagaacaatccgtttgaatatacaatattaatatggttttcaactactacgccaccagtttcatctataaatccctgaggtaaaattgccgctaaaatccttctgtcctgttccttcgatgttgtccgctgaacaagcacacattcagattttgtcacaaggaaaccctgttgtggggttatatcgatatagggaacatgattttttctgtctgcactaaaacgaaaaccagctgaagttattgattccgcccagactaatgggtagctattttttcctttcgtcgtacgcaactgcgacttaaatcgattccagactaactgacctgtagagactgagtatcccagatcagctaaacgcgtagacatctgttttaatacattaagaaaacaggcatcatctttaacgcgtggcaaaagccacgttgctccacctttttctatatcaacattacctattttctcaatttttgctttgttcaaccccttagggacaagtgaggatacctgggcccgaactttatgttctcccgccttgaatgctgtcaacattgtttcctggagaacatcgtcaaagaccccatccctgtcagtgacgaaatcaagggcatacggagtagttttttcggtcaaaagggttcgcagcgcggtgaaatactgcccaccaagaaaagaagttggcgtaagaaatgcaataactcctgttttctctttaaccatgcgaacagctaagtcggtgaacaatccatatagatttgcatgaccaaataacgaacgagaatatttttctctcgttttaatatcgagagtgacacgtccgtaaggcggattccctaccacaagatcataaccagaaaatttatcttgctgaagcgcatcagcaacaataattgtatcttcaggcaatctacgttttacctttacacatagtggcattagtacagattcgagcaataccaaactcatccaagccgcaaatggatcgatttctatcccctttaaacgacgactgattctcctcaacatccattcaggggaagaccccttgtctttttttaacattcgaatggctactggtgccaaaaatgcaccgccaccacacgcaggatcaataaccgatgcatgagaaaaatcaacaccagacttttcagccaggtccaagagacgcgctaccaaaggtgggggggtatagtaagcccccaattccgaacggtaagcggatggcagcattaccgtataaattgacccaatcagatatccagcgtcctccgccggaaattgagcaataagctcacctgttcgttcagcgagctcgcgtgcatcacatggaatgtcttctatgtaaacagtgtgcggtactgccctcattttaatgctgcttttttgcttttttgcaagggtatcccaatatgcagctacgatgctgaagcagtatgagcgggcatgcatcaaccttgactgcccggttttgtaattgcccgcataacctttggccatggctttacaagtttgatatctttccagattagaaaactcattatctgtaaaaaaatcaaaatgttgcacattcataatgtaaaatcctaatgtatcaaacatgcgggccataacatctcatggtggcgcatagcaaactggcccgaagaatatcacgcaccaagtcgatctcataacccgttatgacaataaatctttgtagctgaactcacttggtgatttgtcaatcattcctggcctccagttcgtcctgaatctctttatcgagttcaccgtatttgttagtcctcatcactcacgacttgacttccagaaataaccttgattattcggggctatattttgtcaccctgcgtatccgcgctttcgcattacgctcaatctggattagcttttctatattttttcgcctttcccgctcctcctggcgcaagagccttacatcatctgccagtctggtttctcttttcgccacagagagcatccagtcaaatggctccacaactgcaccgcaaattttacagcggacctgacgctctttttcgtcaacccggacagaagcgtgatggcaatatggtctttccgatggctcataaagaaaattaacctgattacgagggttatcctcttttaccggaaataaaacaatattgcttaactcatcttctggttttatttccatgctcctctcctttgatgcgaatgccagcggtaattgaagcctgatagctaatttcactcacagtaccgcctcctgaaaatcaccctgatagaaagccggtacacgctgcataacttcactcttccggcactcgcgacagattatgttctgatgtctgtcgtagcggcgtatttctccgtctggtaatgaccagataaggtccggatcaaccacagatggtttcttcagctttgccctcgagagttttttgcgggcgttttgccagtccttacgagcctgttcagacgggaataacccgtagccagagttgtatacatccccactggcaaccagctctctggcgagaacgcttattaaatatcttgtcgccccggttttagcttccagttgtcgtaacgtctcgcgcccactctggcgtacgagttcaacaacctgccccttaattttttcccgctcttcctgtgtaaatacttttgccataagcgcccccggcaatcacttttccgacacaatacgaccggaggaatcgacaatctgtcgaacaatatcccggtgcttgttcagctcccgcaacgcggcgcagacacgctcccacttctggacatgacttttcgcccgacgcagttcgcggtttgccatatgcagcgatggtaaaaccaggtcatccgcttgcgtttcggtgaacgatggcaacgactgcacaatgtccgccacagtttctgttttaatttcttcctgtgttgcagcttcctgtaccggtaacgcaacacctgctggctgaggaaagactttaccatccgtttccgctatggatgcggctttcggctctgccggtaaatcagcgcccggtatgcagtaccgaaatttaccgccctgattcacgcgaatcagacgccctttgctgattgccatggccagcgatgaattcgcccggcgggaggtaatcccgaacatcagtgccagctcatccgccgtttgtgggccatgttgttcaatcgcctcagtcagcatttgcgctgtcactttcggtaccggtgacactggttcactttcaccagcctgaatcagccaccacatcgaacccttgttatccgcttcaccacggcgcttcagtttccacagttcgttgaccgcatcttcacggctgattccaaggcgggacgccaccacatgtgaagaggctcttttcagtgctttcagtgcgtcaaatacagtttccattaaaacatcctccaacaaaaattacttcacaactcccggaaagctgacatttgaacgccagctatcccagttaaacgtcacccaccgacaaccgttcatggtcatgcggtccataatcctctcaccaagaagcgtgctcattgcggcatgattcaggtttgttaacatcccgacactgcacagtgatgctgtccggcgatcaattatctggtgcaataccacctgctcgtttttcgtctcccgctgaatgcctatttcatccaggaccagcaaatcaaccccgcaaagctcctgtaaaaatttttcaccggatttgccgttgtcgtagctgtcatgcaacacgctcatgacatcagactcggtgacgataatcacgctgcgccccttcgccatcagccggttacccatcgccgctgcaaggtgatttttcccggtgccggttttaccgctgaacacaaaattcgtgcacccggtcatcagttcgtcagctatggatttggcctggctcagcgcgtatttttgcccgtcgttctgcacctgataattcgcaaacgagcatttgctgtgcagaggctggatgcccgaacgattcaggattttttccacccgcaactggcgattctggcggttaatctcctcgctgcgttttcgtccttcagcaagttgccattcccgccactcctccaccgtccggtacggtggaaccgccccctgtggtgcaagtctgtgaatacgttcaagaaccccggctgccgcaatgtttttcatgccacatcaccccctgaatcccggcggaatttcggtatccggttcagaaatatgattcacacaacgctggttgttcgtgccgcttaccgggagcaaccaggggttttcaaaattccggtccggcccaaaaaacgtcgtcgctcgctgaacaaattccgttcccgctttcccggtcgccgccaggtatctcgcgtaacgcctcacaccatccagcatggtctctggtggcaccccctcgcgcaatctggccttccaggcactgaatgcggatttcttcgggtttgccccggcacgcaacgggtattcccgccagacctgttcgaacacatccggataatccactcgtcccacaggctgcccggtgttttccggggctacccgatcggcttcccgctgaatggcggaatcggcttcaggctgctgcagttggagtgattgctccggccttgcggtcatcacctgctgcacagcgcccgaatcggctttcagcgcatacgctgaatcggcttccggtgtcgagcctgctggctgaccaggattgacggtctgaacatcccctgcctggttcgtggcgttttttacgccatggaccatagtgttttgatcttctttatctgtatctttatctgtatctgtcgtgactcgtcgtgacatgtgcgtgacatttcgtgacgcgccgtgacaatcgccattttgttcccgctttctttccctctctcgctgcgccctcttgcgctctgcaggagattttgcggtttgcgaaatattgccgttgtcctctttaagcacctggcgtttttcccatccagtgattaaatcaccatcaagtacccgcccctgcatcgtctgcaaaattgaatcaattacctcttctgtcacgtcgagcgcacttgccaaatcttctgtcgtgacatcaatgtgacctcgcgtgacatttcgtgacgcgctcaccaggaggtggatatacactgccatcactgttgcaattggctgccctgacaccctggcaattgttcgccacttagggtcatttggcatgtcatgccataatctgagccaggcgttagccatactcacctcttctgataccgaatctttttactcacgagttgccgggagcgattcgatatggctattgtcagtcaatgtactgccacagcatttcctgccgggccaccacggttcatctgattgaaaccggcgattgccactgcgacaaaatcatcagcgtctctcaccagtcgttcatgcgtctccaccagttcccgaaaataagctgaactgtggctgcgcattcgagccaccagcggaggtggcattgccctttcgatcgcaggtaacaacgcctgaattttttcaacagcgtcaggggtgtctttatccagccaacggaaaatcttttgggtgttgagataaagcgtgttgtgcttgctgtcgttatgcagaaccggaaacgtcattcccagttcgaaataaaccctggttatttcagctgccggaactttttcaccgtccggatgcgcccaggctttcatcgccatgcggatgtgttcatgcttgattttcatgaatcaacccccgccgatggttgtgtgttagcctgaaactcagcaggcaagccgtcagttgggttggggtaggttttactgtcaatctcatgtggggtcaccacccatcccgttgcttcacaccaacgtaatattttttctcctgtaagttttgcacgccccgttataacgtggctgaccatcccttgggatgcgccaacaatctcagcaaatgaactctgggttatatgaaaatgatgcaaatattctccaagattcataatccgccctatgtgatgtgttaccaatgcataattaatagcactgttatttttaaaagtaaatagtgatgctatttcaaagtgattagcaatcttattagaattggatgtatgaaaagaaaatcattgtcagacaccgacctcaacgccgccagaagactgaaagaaatctggatggcaaagaaatctcagttgggattgactcaggaacgtgcggcggaaattatggggttttcaacacaaggggcggtaagtcactacctaaatggtcaaaccccactaaaccttgaggctgttctaaagtttgctggcttactgaaagttccccctgagtcaatcaggccagacatggtagatttgctgcaaattgcaaggatgtattgtcgagaaccacagcaagataacatagtcgcattaccagcagacacagaacaaacagaggatgaactaccgtttgccgtagagccgatggaacgagatttaatccatacgttcagagcttttccgaaagaagatcaagaacacatgcttcaggagatgaaagataaaaaagaatcaatggatcgtacggttgcgcggtggttagctgcacaaaaaggccgtcgcgcctaaatcagaggagatatgtaaaatgagtacagtcctttccccaatggtttcagaatttgagacagttgagcaagaaaatagttacaacgaatggctgcgggccaaagtagcagcaagcctcgcggatccccgcccggcgattccgcatgatgaggtaatggcggaaatggaacaaattattgcccaaattgctgctgcaactcacagaggtgaataatgttacccgttttatggctaccatctgctcgtgatgatttgcgccagatcgtagcctacatagctaaagaaaatcccgcggcagcacgcagaatgaaaattcgaattgaaacatccgttttgccgctcacagagcatccttacctgtatcctccaagcgagcgagttcttggtcttcgtgaaattgtaactcatcctaactacatcatcctttaccgagtaacagcatcaagcatagaagtagtaaatattgtgcattctcgaagacagtatccaggcaaaaacagttaattattcccgccgacagaaccaccttagggtggttttttcttgccccaacaaaaaacaatagcgatgctatttacatcaaaaaaataatgatgctattgtttcaggcgtcaacccaccccgccccacagaatgcagggcaatacttcgagttaccagacagtggtcaggggttaagtagccagcccgaggcgtaagaacatgacggcagggttcaatctttaactatgcagcaggttttttgttccgccaccccggcgttaaggggaaatgaggtcagcatggatactatcgatcttggcaacaacgaatctctggtgtgcggcgtgttccctaaccaggatggaacgtttaccgccatgacgtataccaaaagcaaaacgtttaaaaccgaatctggcgcgcgttgctggttagccagaaacactgactgatgaggctgacgatggaatttaaagatttaccgtctgatgtacagaaaacagcagctcatacattgcattctgtgctgcgagaaatcgggaaagatattgcaagcgagccagcaaaagatctggcccggaaaatcaagaccgctttcgttgagctttataatgttggcactgactctgaaactgtcgagaccaagaccgtaagttcaccaatattctcacttgagccaagcgtattatcaggtgaaatatgcaccgagatttccagcgaactgcttccggtaatacgagaagcaattcgccgtcgcggtttggatggaagttatgatcatgacgttctgcaagttctcaggacaatggtgacttcactggggatttgatccctgcgtcctctaagcttttgatatagcggtcctccaagaagcggtaaattttgtcgaaatcatcttttccctctggtttattcagaggattacaggacccgtaagtagcggcatacatttcaaccgtttggtaatgactccaacttattgatagtgttttatgttcagataatgcccgatgactttgtcatgcagctccaccgattttgagaacgacagcgacttccgtcccagccgtgccaggtgctgcctcagattcaggttatgccgctcaattcgctgcgtatatcgcttgctgattacgtgcagctttcccttcaggcgggattcatacagcggccagccatccgtcatccatatcaccacgtcaaagggtgacagcaggctcataagacgccccagcgtcgccatagtgcgttcaccgaatacgtgcgcaacaaccgtcttccggagactgtcatacgcgtaaaacagccagcgctggcgcgatttagccccgacatagccccactgttcgtccatttccgcgcagacgatgacgtcactgcccggctgtatgcgcgaggttaccgactgcggcctgagttttttaagtgacgtaaaatcgtgttgaggccaacgcccataatgcgtgctgttgcccggcatccaacgccattcatggccatatcaatgattttctggtgcgtaccgggttgagaagcggtgtaagtgaactgcagttgccatgttttacggcagtgagagcagagatagcgctgatgtccggcagtgcttttgccgttacgcaccaccccgtcagtagctgaacaggagggacagctgatagaaacagaagccactggagcacctcaaaaacaccatcatacactaaatcagtaagttggcagcatcacccaaccgttttatcaaaaatataagagacaaattcttctttagtcatatagatttccttcttggttattcgggataagaaggataccacctcgcctgacgtggttaaaagcaggcacacaacgcgaaatgacgcggcggtaagtatggcggagttattccttccccgttgaggacaccgggttgtcaggttgaccatacgcttaagtgacaaccacgccacaacactccatgttgattggtacctttggcggcatcagtttcattgctggctgatgtccgccctttttaaagtgaattttgtgatgcggtgaatgcggctcagcgcacgcggcacagttaaaaagcgattagttcccccgtatcgggtggttatgggtttccctgtatccggcgttaattgttaactggttaacgtcacctggaggcaccaggcaccgcatcaacaaagttcacttcggtgatgaaaggaaagagaaaatgttgaatgtagctattgaaaaccagaacgggtggaattatagtgcacctgcaccttataaaacgggtgccgggcgtggaaacccgaacgttactcgagcgcatagccgcgctgaagcggtttttttatgcgtaatgcacagctccattcaaattatggtgggatgtgcagggcagtcgcaagactggccgggttctcgagtgaccggtatttccacccctgtacgtctcaccacccttatggtcgtggaaaacctcggtggtgagttaattaacttatcactcgaggatgccatcatggctactatccctgccctttctcaccctgacgtaaccatcgaaaatggtcgcgctgtcactacgtctattgcgatcgcagagttctttggcaagcgtcacgacaatgtgttacgtgccatcgcaaatactgaatgctcacctgaatttaacgccctcaattttgaggacgtcacctacactgacgccaaaggcgaaaaacgcccgatgtaccaaatcaccaaaaacggcttcgttttcctggtgatgggattcactggcaaaaaagccgctgcatttaaagaagcctacattgctgagttcgatcgcatggaggccgaactgcgccagaataacaccccacccactgacaaaataattccaggcgatggccgcaccctggttgttcacttcgacgaacgcggcaacatcagattcaccgaaaccgttcctgatggcgcacgggtctgtaccatggagactttccggttggtaatgactccaacttattgatagtgttttatgttcagataatgcccgatgactttgtcatgcagctccaccgattttgagaacgacagcgacttccgtcccagccgtgccaggtgctgcctcagattcaggttatgccgctcaattcgctgcgtatatcgcttgctgattacgtgcagctttcccttcaggcgggattcatacagcggccagccatccgtcatccatatcaccacgtcaaagggtgacagcaggctcataagacgccccagcgtcgccatagtgcgttcaccgaatacgtgcgcaacaaccgtcttccggagactgtcatacgcgtaaaacagccagcgctggcgcgatttagccccgacatagccccactgttcgtccatttccgcgcagacgatgacgtcactgcccggctgtatgcgcgaggttaccgactgcggcctgagttttttaagtgacgtaaaatcgtgttgaggccaacgcccataatgcgtgcagttgcccggcatccaacgccattcatggccatatcaatgattttctggtgcgtaccgggttgagaagcggtgtaagtgaactgcagttgccatgttttacggcagtgagagcagagatagcgctgatgtccggcagtgcttttgccgttacgcaccaccccgtcagtagctgaacaggagggacagctgatagaaacagaagccactggagcacctcaaaaacaccatcatacactaaatcagtaagttggcagcatcacctttccggttttatctggaagaacagggatggactcttgttaaccggggcgcaattaaaaatatgactgtagagcaattactcaaaattcattgttgaggacgcgataatggaaacgttattaccaaacgttaatacgactgaaggttgttttgaaattggtgtcactatcagtaacacggtatttactgaagatgccattaacaagagaaaacacgaacgggagtcattaaataaaatatgcattgtttcaatgctggctcgtttgcgtctgatgcaaaaaggatgctggcgatgaatacagcatttgcactcgttctgaccgttattcttaatacgggcgaaccagctgaactggttaccggagtatacaactccatgaaagaatgcgtggctgctgcagctgaacagaaaattcccggtaactgttatccggttgataaaatcattcaccaggataataaagaagtcccggcaggtctttaaagcagccacgtaataaatatccggtttcatttttatatgccagcaatggcagggatttgttcacccttaaatctgtaatgaggttaaaacaaaatgagtaaagtctttatttgcgccgccattccggacgaaaaggcaacaaaagaagaaggcgctaaacctgtagccactgccattgaagccggcgacgaacgccgcgcccgcgcaaaatttcactggcaattcctggaacattatccggctgctcaggactgcgcttataaatttattgtctgcgaggataaacctggtataccccgccctgccctcgattcctgggatgctgaatatatgcaggaaaaccgctgggatgaggagtctgcttcctttgtcccggttgagactgaatccgaaccgatgaacgtcacttttgacaagctggcccctgaagtacagaacgctgtcatggttaagttcgacacatgtgaaaacatcaccgttgatatggtgattagcgcgcaggaactgttgcaggaagacatggcaacattcgacggacatatcgttgaagcgttgatgaaaatgccagaagttaacgccatgtgtccggagattaaactgcatgccatcgggtggattaagcataaatgtaagcctggtgcaaaatggccagaaattcaggcagagatgcgcatctggaaaaaatgtcgcgaaggtgaacgcaaggaaaccggaaaatacacgtctgttgttgatctcgcccgtgccagagccaatcaacagcacactgaaaattcaacaggaaaaatcagcccggccattgctgccattcatcgcgaatacaagcagacatggaaaacactggatgacgaactggcctacgctctctggcctggtgatgtggatgccggaaacattgacggcagcatccatcgctgggcaaaaaatgaagttatcgacaacgaccgcgaagactggaagcgtatctcggcatcaatgcgcaaacagcctgatgcccttcgctacgaccgccagactatttttggccttgtccgtgaacgtccgatcgacattcacaaagaccctgtggcactgaacaaatacattactgaatacctgactacaaagggcgtgtttgaagatgaaggaacaaatcagagcgcaactgatacttgaggtgtactggcaatagcggacactaccatttgttctttttttaagcagccatctgatgatatttttccctgaaggctgccggggagatattccccagacgagagtgacgacgctgacgattgtagaaaatctcaatgtattcccgtattactgagatggcttcatcccggttattaaaacgatagtggctcaggctctcatttttcagcgttccccagaagctttccatcggagcgttgtcgtaacagttacctttacgcgacattgatgttttcagaccagactgctcctgtatgacccggtaatcgtatgcgcagtactgtgaacctcgatcagagtggtggattagcccggcaggtgggcgctggctcctgagcgccataaacagggctttacctgtcagctcttttgtcatgcgctctcccatggcgtagccgacaatttcgcacgtataaacatctttgatgccagcgaggtacaaccatccctcctgtgtggcaacatacgtcaggtccgccacccagacctgatttggtgctgtaggagcgaacgtctggttcagcagatttggcgcaactggcagattgtggttcgagttcgtagtcgctctgaacttgcgtttctgcttacagcgtagccttagctccttacgaagacgtgccagtcggtcacgaccaacgatgatgccattctctgccagctccgtctggagccgccgggttccatatgtttcgcgagtgcggatatgtgccaccttaatctccagttttagccgctcatcactttgttttctgtctgagggttcatgctgtacccagttgtaataaccgctcctggatacaccaaatacctgacacatcgcttcaatgggaaattgttgtcgccattgttcgattaacgcgtatttttcagcgactcctgtgcaaaatacgctgttgctttttttaatatatctcgctcaaggcgagcttcatttaacgccttacgcagttgcagaatttcagattccagttcagccaccgtgcgggaaccaggagtaccgagcccttttctggcggcggtaacccattgtcctaaagtgccttcaggaagagataatcgggaagcgccttcactgatcgaaagttgattttcaagaaccgttctgacagcttcggctttgaactctttagagtaacgttgggtttttctgctcattattagctccttctgatgccattctatttcaggaaggagtgtccgttaaactcaggctacctcaatatgccgacattctgctgccagacctgatgaccgttgagcaggaagatattattcctaacgactacgccggtaacatgggatatctcattttcctccagcctgtcaccagcgaaaaattcgaacgcaaaccgatttactggatcctgagtgaagtcgcgaaacgtcttggacctgacgtctatcaaaagttcactgaaggtcgcacgcaggaacaatggttacaacatctgtacgccaaaatgcttgccaaagatccggcgttaccgtcttacgacgaactgaaaaaaatgggtatctataagcgtaaagatcccaatggtcattttgtcgcctacaaagcatttcgtgacgaccccgaggcaaatccacttaaaacgccttccggtaagattgaaatttattccagcaagctggcggaaattgcccgtacctgggaactggaaaaagatgaagtgataagcccactgccagtttatgcctcaacctttgaaggctgggactcccctgaacgtagtaccttcccactgcaactgtttggtttccattacaaatcccgtactcactcgacctacggcaacattgatgtcctgaaggcagcctgccgtcaggaagtgtggatcaaccctatagatgcacagaaacgtgggattgccaccggcgatatggtgcgggtgtttaaccatcgtggcgaagttcggctaccagccaaagtaacaccacgcattctccctggggttagcgctatgggccagggagcctggcacgaggccaatatgtctggcgataaaatcgaccatggcggctgtgtgaatacgctaaccactctgcgcccttcaccactggcgaagggaaacccgcagcacactaatctggtcgagatcgaaaaaatataacccactacaaccataaattctggcatgacattttgtttgaaaagcaataagtgagtaatgatgaaaatccataccacagaggcgctcatgaaggctgaaatcagccgtagaagtctgatgaaaacctccgcacttggcagccttgcgctggcaagcagtgctttcactctgccattttcccaaatggttcgggcggcagaggctccggtagaagagaaagcggtctggagttcctgcaccgttaactgcgggagccgctgtctgttacgtttgcatgtgaaagatgacaccgtgtactgggtggagtatgatacgacaggtgacgacgtctacggtaatcatcaggttcgcgcgtgtttacgcgggcgctctatccgccgacggatgaatcatcctgataggttgaaatatcccatgaagcgcgtcggcaagcgcggtgaaggtaaatttgaacggataagttgggacgaagccctggataccatcagtgataatcttcggcggatcctaaaagattacggcaatgaagctgtacatgtcctgtacggaacaggtgtagatggcggaaacatcaccaactcaaacgtcccgtaccgtctgatgaactcttgcggtggttttctcagtcgctatggcagctacagtaccgcacagatcagtgccgcaatgagttatatgttcggtgccaatgatggcaacagcccggatgatatcgccaatacgaaactggtcgttatgttcggaaataacccggcagaaacgcggatgagcggtggtggtgtcacttactacgtcgagcaagcccgcgaacgttcaaacgcacgcatgatcgtcatcgatccacgttataacgacacagctgccgggcgtgaagatgaatggctgcccattcgccctggcaccgatggcgcactggcctgtgcgattgcctgggtactgattactgaaaacatggtcgatcagccatttctcgacaaatattgtgttggttacgatgaaaaaacgctgcccgccaacgcaccacgtaacgcgcattataaagcctatattctgggcgaagggcctgacggcatagctaaaacgccggaatgggcagcaaaaatcaccagcatcccggcagaaaaaattatccagttggcacgagagatcggttcagcaaaacctgcttatatttgtcagggttgggggccacaacgacactccaacggcgaacaaacatcccgcgctattgccatgctttccgttctcaccggtaacgtcggcataaacggcggcaactcaggcgtacgcgaaggtagctgggatctgggggtagaatggttcccgatgctcgagaatcctgttaaaacgcagatttccgtctttacatggactgatgccatcgaccatggtacggaaatgaccgcgacccgtgatggtgttcgtggaaaagaaaaactggatgtccccatcaagtttttatggtgctacgccagtaacacattgatcaatcaacatggcgacatcaatcacacccatgaggtgcttcaggatgacagcaagtgcgagatgattgttggcattgaccacttcatgacggcctcggctaagtattgcgatatcctgttgcccgacctgatgccaacagagcaagaagaccttatctctcatgaatctgcagggaatatgggctatgtgatcctcgcccaacccgcaacctcagcaaaatttgaacgcaaacccatctactggatgctgagtgaagtcgccaaacgcttaggaccagacgtttatcaaacctttactgaaggtcgcagtcagcatgaatggatcaaatatctccatgcgaaaacgaaggaacgtaaccctgagatgcccgactacgaggagatgaaaacgaccgggatctttaagaaaaaatgcccggaagaacactacgtcgctttccgcgcattccgtgaagatccacaggcaaacccgttgaaaacaccttcggggaaaatcgaaatttattctgaacgactggcgaagattgcggatacctgggaattgaaaaaagatgaagttattcatccccttcctgcgtataccccaggttttgatggctgggacgatcccctgcggaaaacctatccactgcagttaacgggcttccattacaaagcgcgtacccactccagctacggcaatattgatgtgttacagcaggcctgcccacaagaggtgtggatcaaccccattgatgctcaggcacgcggtatccgtcatggcgataccgtgcgggtatttaacaataatggagaaatgctgattgccgcaaaagtgactccgcgtattctgcctggcgttaccgccatcgggcaaggtgcttggcttaaagcggatatgtttggtgaccgggtcgatcacggcggcagtatcaatattctgacctctcaccgcccttcaccgctggcaaagggaaacccgtcgcacagcaatcttgtccagatcgaaaaggtttaaggagtagcccgtgaccacacaatatggattttttatcgattccagccgctgtactggctgtaaaacctgcgaactggcgtgcaaagattttaaagatcttggcccggaagtcagtttccgccgtatttatgaatatgctggcggcgactggcaggaagataatggcgtctggcaccagaacgtgttcgcttattatctctccatctcctgtaaccattgcgatgaccccgcatgtacaaaagtctgccccagcggcgcaatgcataagcgtgaagatggctttgtggtggttgatgaagatgtttgtatcggctgccgctactgccacatggcttgtccgtacggcgcgccacagtacaatgctgaaaaagggcacatgacgaagtgcgatggttgttattcgcgcgtcgccgaggggaaacaacccatatgtgtcgaatcctgcccgctgcgtgcacttgagttcggtccaattgaagagctgcgccagaagcacggcactctggctgccgtcgcgccactgccgcgcgcgcatttcacaaaacccaatatcgttatcaaacctaacgccaacagccgcccgaccagcgataccactggttatctggctaatccggaggaagtgtaaaatgggaaatggatggcatgagtggccactggttatctttaccgtattgggtcaatgcgtagtaggcgcgctgattgttagcggaattggctggttcgccgccaaaaatgacgcagaccgtcagcgtattgtccgtggcatgtttttcctctggctgttgatgggcatcgggtttatggcctctgtcatgcacctgggatcgccactgcgggcgtttaactcgctgaatcgaatcggagcttctggtctgagtaacgagattgctgccggttccatattttttgccgttggcggactatggtggctggtggcggtcatcggtaaaatgccgcaagcgttggggaaactctggttacttgtcagcatggcgctcggcgtcattttcgtctggatgatgacctgcgtgtatcaaatcgacactgtgccaacctggcataacggttacactacgctggctttcttcctgacggtattgttgagcggtccaatacttgctgccgcaattctgcgggcagcccgcgttacatttaataccacaccatttgccatcattagcgttctcgcgctgatcgcttgtgccggggtgattgtgctgcaaggtttgtctctggcgtctattcactcatccgtgcaacaagccagcgcactggtaccagattacgcctccttacaggtctggcgtgtggtattgttatgcgcaggtcttggatgctggctttgtccgctcattcgtcgccgtgaacctcacgttgccggacttgttctggggctaatcctcatacttgttggtgagatgatcgggcgtgtgctcttttatggcctgcacatgacagtaggaatggctattgcaggttaacaaattggtgcggggcaacccgcacatttcaggatgttaggaatgacccatttttcacagcaagataatttttctgtcgcggcgcgcgtgttgggcgcgctgttttattacgctccagagagtgcggaagccgcacctctggttgcggtactcaccagtgacggctgggaaactcagtggcctctaccagaagcgtcattagcgccgctggtgacggcttttcagacacagtgtgaagagactcacgcccaggcctggcagcgtttgtttgtcggcccgtgggcactgccgtctccgccgtggggatcggtctggctggatcgcgaatctgtgctgtttggcgattcaacattggcacttcgtcagtggatgcgcgagaaaggcattcagtttgaaatgaagcaaaacgaaccggaagatcattttggttcactgctgttgatggctgcgtggttggcggagaatggtcgccagacagaatgcgaagaattgctggcatggcacctttttccgtggtcaacacgttttcttgatgtttttatcgaaaaagcagaacaccctttctaccgtgcactgggtgaactggctcgcttaacgctggcgcaatggcaatcacaactgttgattcctgtcgcggttaaaccactctttcgataggatcaccgtaatattgccggatggtgacgattacgcgcgattcggcaataataagttacaatgtcacgtttttttatctcttaaagcacgcactgcttttgcggttggcctcttttgccgcaaaatagtcgcccgtgtttcattgcccatttctgctcatgcatcatctacacatctatccggatctgcgcactatgttccgccgtctgcttatcgcaacagtcgtcggtattctcgcggcctttgccgttgccgggtttcgtcatgcgatgctgctactggagtggttgttcctcaataatgactccggcagtctggtcaatgcagcgacaaacctttccccctggcgacggctgctaactccggcgctcggcggactggcggcgggtttgttgctgatgggctggcagaaatttacccaacaacgccctcatgcgccgaccgattacatggaagcgttgcaaaccgatggacagttcgattacgcagcaagcctggttaaatcgcttgcctcgctgctggtagtaaccagcggcagtgcaattggtcgcgaaggtgcgatgattcttttagctgcccttgccgcctcctgttttgcccaacgttttacgccacgccaggaatggaaattatggatcgcctgtggggccgcggcgggaatggctgcggcctatcgcgccccgcttgctggcagtttatttatagccgaagtgctgtttggcactatgatgttggcctctctcggcccggtgattatttccgccgtcgtggcgttgctggttagcaatcttattaatcatagcgacgcgttactctacagcgtacaactctcagtaacggttcaggctagtgactatgcgctgattatcagtacaggtgtgctggcaggtctgtgtggaccactgttgttaacgttaatgaacgcctgtcatcgtggatttgtgagtctcaaacttgcgccgccctggcaactggcactaggcgggttgatcgtgggtctgctttccctgttcacacctgcagtgtggggcaacggctatagcaccgtacaatcctttttaaccgccccaccactgttaatgatcattgccgggatcttcctttgtaaactgtgtgccgtgctggcgagtagcggttccggcgcacccggtggtgtctttacaccgacgctatttatcggtcttgccattggcatgttgtatggtcgtagcctgggattatggttccctgatggcgaagaaattacgcttttactcggattgaccgggatggcgacactgttggcggcaaccacgcacgcgccgattatgtcgacgttgatgatatgtgaaatgaccggggagtatcagctactccccggtttattgattgcctgcgtcattgcgtcggtaatttcgcggacgttacaccgtgactctatctaccgccagcacactgcgcagcatagctaagcggatgtattgccccagttctcgctgttcggcgcgcggcagataaggcagttcaccaatgagcggtgccggaagttttttacccagcacatcaatgacttccgcataatgcgccagtcctgggttgattcggttagccacccagccaatgagcggcagcccgtcgttggcaatcgcctgagctgttagcagtgcatggttaatgcaaccttcctgaataccgacaaccatcaacaccggcaactgttcctgcaccacccattcagagagtggacgcaaatcattcatcagactgcgccagccgccagtcccttctaccacgacatgatcgactttatcggtcaggtttgccaggccgtttgaaatgagggtgtaattgattgggcaactgtgcgccacgctactttcttcttcgcttaacgcgataggattaactgcttcataaggcagttcgatggttgaaacactctgcaacaccagggcatctttattacgcagcccttcgggtgtctctttgctccccttcgctacgggtttatatcccgcaactgtttttccctgggaggctaacgcttgtagcaatgcgcgggaaaccaccgttttccctacagaagtgtctgtaccggtaataaagaaacgctccagcatcactaactccaccgttatgcttcacaaatataaactaggaaaataattaaccttgaaagtctaagttatgctttcctggcccaaattgagatagcgcaaattttggtagaacagttaaaaaatgttaaccctgcaacagacgaatcaacaaagaaccgttatacatcgcgtcttttaccagcgcagcgcctgccatcgtgccctggttagaaaactgagtactctcaacgctaatgtgctgactatacgcaggaagggcctgctgacgtatgctgtccgagatgacagggaagaggatatctgccgctttacttaacggtgagccaatcagtattttttgtgggttaaataaattcaccatgatggcaagaatgcgcccgacatgcgcgcccaccccggtaatgatgtcttttgccagtagatcgccgcgcaatgccgcctgacacaatgagtccacggttaacggttgcccatgtaacatcgagctcatggattgattgagacgcagctgtgccagctcaagaatactgtccacactggcgatggtttcgaggcagccgtggttcccgcaataacagcgtttaccatatgggtcgacctgtgtgtggcctatttccacgagactactgctgcctgcgtgtagcagatgaccatcggtaatgacgcccgcccccacgttgtgatcgataaccacctgaatcacatcgcgcgccccgcgtgaggcaccaaacaaggcctctgccatcgtccatgcgctgatatcatgctgaatataaaccggtacgccggtatgctgctccagcgcctcgccgagcggcatctcttttacatcctcgtagaacggcatgcgatgtacaataccattttccgtatcaataattcccggcagggttatggcaatcgaagttagacgctcaagttttttctggtggcggataaaaaactgatcgatatgggaaatgatacgatccagcaatggcaagtcatcttttaacgccagttcctgcgactcttccaccaccagtttgctgctcagatcgcgcagagcaaggaaaatctccccgcgactaatgcgcagagaaagatagtgccaggcttcagtttcaaccaccagccccaccgccggacggccacggttccccgcttctttgatttccagctcttgcaccaggtgtgcttcgagcatctcacggacaattttagtgatactggcaggagccagctgcgccagacgggaaagatcgatacgcgagactggaccaagctgatcaatcaggcgataaaccgcgcccgcgttggtctgctttatttgatcaatgtgcccaagctggttttcagcaaccaccgcatactccctatattttcgcgctccgaaataatctgtaggctatggtgaagcacttcaatacgtgtcgtcaaatttttacttaggcatgtgattaacagcacatttttcgggctttttcgctgaaatttccctcacctgagagcattcagcagatgaatacgaaagttacgcgaagctggactttgttcatgatgtttcggccagaccaaccacatttcagaaaccgcatcctcttcagcaatcggcacccagcgcatttcgttgagctgaacacgtttaaatgaagcaggcaaaattgaaacacccagaccggcggaaaccagaccgatgatggtcattgcctcgcccacctcctgagtgatgacgggcgtcaaatggtaacgtcgcatcagcccgagaatatcgtcatacagccctgtcccgacgtgcggatcaaaaaagacgaagggttctttcgccagttcagccagcgttacattcgggttatttgccaggggatgatcgtgcgggatcatcgccataagcggttcatggacgatgactgcgtgttcaagcgtctccggtaacgctgtgttacgcagcaatcccatatccagcgttccttcaatgagcggagcgatttgctcacgagtgttcatttcgcgggtttgtaaatggacatcgggataatcacggcgaaacagcgataacgtatcggacaccgcccgaataaaaggagcggacgaagtaaaaccaatgcgcaactcccccgcttcaccctgatgcagtctttcagcgcgagcggcagcgtcatctaccatagacaggatttgccgactatctgcaagaaactgttttcctgctgccgtcagcaatacactgcgattagttcgtgccagcagtcgggcaccaatttgttgctccagtgcctgaatctgctgacttagcggtggttgcgaaatattcaggcgggcagcggcgcgcccgaaatgcagctcttccgcaacagcaacaaagtaacgcagatgacgaagttcaatattcatatttaaaacatcttatttgagattattaatatattagacagaacaattcgattttcctaacctatgtataagcctgatccacaggcatatttagcaaggatttcaagtgagccgtactacaactgttgatggcgctccggcaagcgacactgacaagcaaagcatttctcagccaaatcaatttattaaacgcggtacgccgcaatttatgcgcgtcaccctggcgctgttctctgccggactggcaacctttgcactcctctattgtgtgcagcctatccttccggtgctttcgcaggagtttggcttaacccccgcgaacagtagtatttcactgtccatttccacggcgatgttggctattggtttgctgtttactggccccctatccgatgccattggtcgcaaaccagtgatggtcacggcgctactgttggcctccatttgtacgttactttcgacaatgatgaccagctggcacggcattttgattatgcgcgccttgattgggctttcgttaagtggcgtggcagctgttggcatgacttatcttagcgaggaaatccaccccagtttcgtggccttttcgatggggttgtatatcagcggcaactcaattggcggcatgagcggacgcttaattagtggtgtcttcacggactttttcaactggcgaattgctctggcggcaatcggttgtttcgcgctagcctcggcgttgatgttctggaaaatccttccggaatcacgccattttcgcccgacttcgctgcgccctaagacgttatttatcaactttcgtctgcactggcgtgaccggggattaccgttattgttcgcagaaggctttttgctgatggggtcgttcgtcacgctgtttaattacatcggctatcggttgatgctttccccctggcatgtcagtcaggccgtggttggcttattatcgctggcttatttgaccggtacatggagctcacccaaagccggaaccatgaccacccgctacgggcgcggtccggtgatgttgttttcgacgggggttatgctgtttggtttactgatgaccttattcagctcgctgtggctgatctttgccggaatgttactcttctcagcaggattcttcgcagcccactcagttgccagcagctggattggcccccgcgcaaaacgcgctaaaggccaggcctcctcgctgtatctgttcagttactatctggggtcgagtattgccgggacgctgggtggtgttttctggcataactatggctggaacggcgtcggcgcatttattgctctgatgctggtcattgctctgctggtcgggacgcgtttgcatcgtcgtctgcacgcctgaaaaataagcccggactgcggtaactacacgtccggacttattgcttgctcaaaccaacgttaatagccatcctaaaatagacgaagcgccagccaattcccgcagcgcgtctagcgtcatcaggattataagtacccaaataaacggattcattttgctgtgtgtcatttattactgatgcgcagttattctaccgctttgtaagtagtaaaatagttaacccgatcaagactactattattggtagctaaatttcccttaagtcacaatacgttattatcaatgctgtaatttattcagcgtttgtacatatcgttacacgctgaaaccaaccactcacggaagtctgcctagactggccccctgaatctccagacaaccagtatcacttaaataagtgatagtcttaatactagtttttagactagtcattggagtacagatgattgatgtcttagggccggagaaacgcagacggcgtaccacacaggaaaagatcgcaattgttcagcagagctttgaaccggggatgacggtctccctcgttgcccggcaacatggtgtagcagccagccagttatttctctggcgtaagcaataccaggaaggaagtcttactgctgtcgccgccggagaacaggttgttcctgcctctgaacttgctgccgccatgaagcagattaaagaactccagcgcctgctcggcaagaaaacgatggaaaatgaactcctcaaagaagccgttgaatatggacgggcaaaaaagtggatagcgcacgcgcccttattgcccggggatggggagtaagcttagtcagccgttgtctccgggtgtcgcgtgcgcagttgcacgtcattctcagacgaaccgatgactggatggatggccgccgcagtcgtcacactgatgatacggatgtgcttctccgtatacaccatgttatcggagagctgcccacgtatggttatcgtcgggtatgggcgctgcttcgcagacaggcagaacttgatggtatgcctgcgatcaatgccaaacgtgtttaccggatcatgtgtcagcgccagtgatataagacggtaattcgccatttggattgtccgctccacccaacatgttgtttccttaaggttctcacaccagaaaggacatcaacatgctgagcagagaggacttttacatgataaagcaaatgcgccagcagggcgcgtacatcgtcgatattgcgactcagattggttgctctgaacggacggtcagacgctacctcaaataccctgaaccgccagccagaaagacccgccacaaaatggttaagctgaaaccgtttatggattacatcgacatgcgcctggcagagaatgtctggaatagcgaggttatcttcgcggagattaaggcaatgggttatacgggcggacgttccatgctgcgttactacatccagcccaaacgtaaaatgcgtccgtcaaaaagaacagttcgcttcgaaactcagcctggataccagctccagcatgactggggcgaagttgaggtggaggttgccgggcaacggtgcaaagttaactttgcggttaatacgctggggttctcccgcagcttccatgtcttcgccgcaccaaaacaggatgctgagcatacctacgaatcactggttcgcgccttccgctacttcggtggttgtgtgaaaacggtgctggttgataaccagaaggctgcggtgctgaagaataacaacgggaaagtcgtgttcaactccggattcctgttgctggctgaccactataacttcctgccacgggcatgccgtccacgcagggccagaacaaaaggtaaggttgagcggatggtgaaatacctcaaggagaacttcttcgtccggtaccgcaggttcgacagcttcactcatgtcaatcaacaactggagcaatggatagccgatgtggctgacaaacgggagcttcgccagttcaaagaaacgccggaacagcgcttcgcgctggagcaggaacatctgcagccgttaccggatacagacttcgataccagttacttcgatatccgccatgtgtcctgggacagctatatcgaggttggtggtaatcgttacagcgttcccgaagcgctgtgtggtcagccggtatcgatacgaatatcgctggatgacgagttgcggatctacagtaatgagaaactggtggcctcacatcgcctctgttcagcatcgtctggctggcagacagtgccggagcatcacgccccgctctggcagcaggtcagtcaggtggaacatcgaccactgagtgcctatgaggagctgttgtgatgcatgaactggaagtcctgctgagtcgcctgaaaatggagcatctgagttatcacgttgaaagcctgctggaacaggcagctaaaaaagagctgaactaccgggagttcctgtgcatggcgctacagcaggaatggaacggcaggcatcagcgcggtatggagtccaggctgaagcaggctcgtctgccgtgggtcaaaacgctggagcagttcgactttaccttccagccgggcatcgaccataaggttgtccgggaactggctggtctggcgttcgtggagcgcagcgaaaacgtgatcctgctgggccctcctggtgtcggaaaaactcatctggccatagctcttggcgtgaaagcggtggatgcgggacatcgggtactgtttatgccactggacagactgatcgcgacactgatgaaagcgaaacaggaaaaccggctggagcgtcagctacagcaactgagttatgcccgggtgttgatcctggatgaaataggctatctgccgatgaacagagaggaagccagtctgttcttccggctactgaaccgtcgatatgaaaaagcgagcatcatactgacgtcaaacaaagggttcgcagactggggagaaatgttcggagatcacgtactggcaacagcgatcctggatcggctgctacatcactcaaccacgctgaatatcaaaggagagagttaccggttaaaagagaaacgtaaagctggagtgctgaccaaaaacacaacgccaatcagtgatgatgaaatggtggaaagcggacagcatcagtaacgaaagtatttagcgggcatgaaaatggcaaataacggtcaaacatcgtggcgttgacatcatgcgccagaatgcgctgttgcttgagcgaaaacctgctgtaccgccatcgaaacgggcacatacaggcagagtggccgtgaaagaaagtaatcagcgatggtgctctgacgggttcgagttctgctgtgataacggagagagactgcgtgtcacgttcgcgctggactgctgtgatcgtgaggcactgcactgggcggtgactaccggcggcttcaacagtgaaacagtacaggacgtcatgctgggagcggtggaacgccgcttcggcaacgatcttccgtcgtctccagtggagtggctgacggataatggttcatgctaccgggctaatgaaacacgccagttcgcccggatgttgggacttgaaccgaagaacacggcggtgcggagtccggagagtaacggaatagcagagagcttcgtgaaaacgataaagcgtgactacatcagtatcatgcccaaaccagacgggttaacggcagcaaagaaccttgcagaggcgttcgagcattataacgaatggcatccgcatagtgcgctaggttatcgctcgccacgggaatatctgcggcagcgggcttgtaatgggttaagtgataacagatgtctggaaatataggggcaaatccactgccattcccagggatatagttatttcaacggccccgcggtggggttaaatgaaaaaacaaattgagggtatgacaatgaaaaagtattagctctggttgttgccgctgctatgggtctgtcttctgccgcctttgctgcagagactgcgaccacacctgctccgactgcgacgaccaccaaagcagcgccggcgaaaacgacacatcataaaaaacagcataaagcagcacctgcccagaaagcgcaggcggctaaaaagcatcataaaaatacgaaagctgaacagaaagcccctgaacaaaaagcgcaggcagcgaagaaacacgccgggaaacacagccatcagcaaccggcaaaacctgctgcacaacccgcagcgtaagttttcaacagtaatgctggcgcgccccctcgcgcctgaaaattacggtgctaagcgggtaacgtttagcaccgcctttagcggagggtagtatggtgggccgttatcgctttgagttcattcttatcatccttattttatgcgcactgattgccgcccgtttttatctttcctgactgtagttatctgattttactcccactttcatcccgtcccgtctatagtatttatgagggtttgcttttaataatcataattacccaccagagtgtgatatgcgtacaaccattgctgtagtgttgggtgcaattagtttgacgtctgcttttgtgtttgcagataaaccagacgttgccaaatcggcaaacgatgaggtcagcaccctgttttttggtcatgatgatcgtgtgccagtgaatgacacgacccaatcaccgtgggatgcggttgggcaactggaaacggccagcggcaatttatgtacggcgacgctgattgcacccaatctggcattaacggcaggacactgtttattgacacctccaaagggtaaagccgataaagcagtggcgctgcgttttgtgtcaaataaaggtctttggcgctatgagatccacgacatagaaggccgcgttgatccgacactgggaaagcggttaaaagcagatggggatggttggattgtacctcccgcagccgcgccgtgggacttcggattgattgtgctacgtaatcccccttctggcattacaccgttgccgttatttgagggagataaagccgcgcttactgccgcattaaaatcggctggccgtaaagtaactcaggcgggataccctgaagatcatctcgatacgttgtacagtcatcaaaactgtgaagtgactggctgggcgcaaacgtcggtgatgtcacatcagtgcgataccttgccgggtgacagcggttcgcctctgatgttgcataccaatgacggctggcaattaattggggtgcaaagttcggctcctgccgcgaaagatcgctggcgcgccgataaccgggccatttctgttaccggttttcgcgacaagctggatcaactgtcgcaaaaataatgttcaaacgctgcccgactgtgcgggcagcgtgttcatcaggcaagtttcaccatgatcattccagccaacagcaagaccaggccaatccagcctttacgatttaaccgttgaccaaacaagatccaacctgcggctaacgtggcggcaataccaaacccgccccacaatgcataagcgacagacaagtcgatccctttaacggcctgagaaagcgcactaaaggcagccagcaccgccgccagggagagcaagccaaatattttgcgacgaaagccgtcagaaaatttcaaaaagacgttagcaacgatttccagcacgattgccaatgccagccaggcggcgtgaacccattcaaactgcgccatggttcacctccagttcaggtttacgcgctttacgggtacctgattttatcaacacaatcccggcgaccagggtggttaacccggcaattttcatcagcgataaactttcgtcgaataacaaaacgctaaacaaggtaataaataaaataccgataccttcccacagcgcataagctacgcctaaggcgatctttttaacggcgaaagagagaaatatatacgacagagaaatcatcaccagcattaaaataaagccgccatttccctcactgacgctcgcccatttcattgacagcgtaccggtaatttctgtagcaatagccaggcctaataaaatccaataaatatacattgtccttctcctgcaagagaattattttaattttcgcttaattcagcgaaaccaaagtaaagtggtcaagccccgcgcatagggcaagcttaggcagaagaaaggactaaagcgcgttgcgccagtgctgctcacctacgagcaagatagtggatgaggtacgaagatgggtaaatgttgaaaataacgtcctgaacaaattgtccataatattacaattatccgcagtgttgcttctcgtcatcgcggatgataattgtcctcggtagttgaacacgcctgatttgtatcatagcttaagaattaactcaaaatattttcacttctttacctgagcggtttgattttcgttatgatgacggagcgaaaaagacattattattagcaaaggaagaaaaaacggggacaagcatggcaaagccgatcatcacgctcaatggcctaaaaatcgtcattatgttgggaatgctggtcattattctctgcggtatccgttttgccgccgagatcatcgtgccgtttattctcgcattatttattgctgttattcttaacccgctggtgcaacacatggtccgctggcgagtgccgcgtgtactggcggtgtcgattttgatgaccatcatcgtgatggcgatggtgttgctattagcttatctgggttccgcgctcaacgagttgacgcggacgttaccgcaatatcgcaactctattatgacgccgctgcaagctcttgagccgttgttgcaacgcgtagggattgacgtctcagttgaccagctggcgcattacattgatccgaacgcggcgatgacgttgctcaccaacttattgacgcagttatctaatgccatgtcatcaatatttttattgctgctgacggtgctgtttatgctgctcgaagtgccacaattgcccggaaaatttcagcaaatgatggcgcgtccggttgaagggatggcggcgattcaacgtgcaattgacagtgtttctcattatctggtgctgaaaacagccatcagcatcatcaccggcctggtcgcctgggcgatgctcgccgcactcgatgttcgcttcgcttttgtctggggattgctggcctttgcgcttaattacatccctaatattggttcagttctcgcggcaatcccccctatcgctcaggtactggtgtttaatggcttctacgaagcgttgctggtgctggcgggatatctgctgattaatctggtcttcggcaatattctggagccgcgcatcatgggacgtgggctggggctttccacattggtggtatttttgtcgttgattttttggggatggttgttaggaccggtgggtatgctgctttccgtgccgttaacaattattgtcaaaattgcgcttgaacaaacagcgggaggtcaaagcatcgccgttctgttaagcgatctcaataaagagtgacggcctccgcagaggccgtcagggttacagagctttcaggattgcatccacgctggctttggcgtcaccaaacagcatgtgggtgttttccttgaagaacagcgggttttgcacaccagcatagccagtgttcatcgaacgtttaaagacaatcacgttctgcgctttccacacttccagcacaggcataccagcaataggactcttcggatcatcctgcgccgccgggttaaccgtatcgttagcaccaatcaccagtacggtatcggtatcagcaaagtcatcgttgatctcgtccatttccagcacgatgtcatacggtacttttgcttcagccagcaatacgttcatatgtccaggcaaacgccccgcaaccgggtggataccgaaacgcacgttgataccacgagcgcgcagtttctcggtaatttcagcgacaggatattgcgcctgcgcgactgccatgccgtaccccggagtaatgatcactgaatgggagtttttcagcagttccgctgtctcttctgcggtgatttcgcggtgctcgcccacttcctgatcatcgccagtagaagagccgtcggtgccgaaaccacccgcaataacgctgataaaggaacggttcatcgccttacacataatgtaagaaaggatagcccccgaagaaccgaccagcgcaccggtcacaatcagcaggtcgttgctgagcataaagcccgcagccgcagccgcccagccggagtacgagttcagcatcgacaccaccactggcatatctgcaccaccgatggaggcgactaaatgccagccgaataccagcgcaatggcggtcattattagcaatgccagcacttgcaggccgacgctgtccgtgcgaacaaatacaatcagcagcaggaaggaaacgaccagagccgccaggttcattttgtgacggtttggcagcatcaacggtttagacgaaatcttgccacacagtttgccgaacgccaccaccgaacccgtgaacgttaccgccccgatgaagataccgaggaacacttccgtcaggtgaatattgaccagaatcggtgccattcccgcgtcatgatgcagatagctgttaaagccaaccagcactgccgccagacccacgaagctgtgcaggatcgccaccagttctggcatttcggtcatttcaactttcttcgccagacggataccaattgccccaccaatgaccatcgccagcaagatccagccaacattacccgtatccggtccaaaaatggttgcgattaacgcaatcgccatcccggcgataccgaagttgttaccctggcgagacgtttcatgtttcgaaagaccggccagactgaagataaacaggatcgcggcaacaatgtatgcagctgtaactaatcctccagacatatgttaccccttaatttttgcggaacattttcagcatgcgctgagtcacggtgaagccaccgaaaatattaatgctggctataagcaccgcgataaaactaaggaagctaacccagccgccctggccaatctgcaacagtgctccgacaacaataatccctgaaatcgcgttggtgaccgacatcaacggtgtatgcagcgcgtgcgatacattccacaccacgtaataaccgacaacgcaggccagcgcgaaaacggtgaagtgcccaagaaactctttcggcgcaacgcttgccagccaaccgaaaaggatgattgccagcgccatcaacgcgtatttacgccacggtgagcaggcacatttttcctcagttttcacttccggtgccgctttttgtgccgcctgcggctgagctgatacctgaatcggcggtgccggccaggtaatttcgcccgcacggatcacggtcacgccgcgaatcaccacatcatcaaaatcaacagtgatattgccgtctttctctttgcacaacagtttcagcagattaacgaggttagtaccgtaaagctgcgaggattgcgtcggcagacggcccggaagatcggtataaccaatcactttgacaccattttccgtagtgaagatttcacccggcacggtgtattcacagttgccaccgttttgggctgccaggtcgacaatcacactgcccgccttcatggagtcaaccatttcacgggtaattagcttcggcgctggtttgcctggaataagcgcggtggtgacaatgatatcgacctcttttgcctgggcggcaaagagttccatttccgctttaatgaacgcgtccgacatcactttggcatagccatcgccgctgcccgcttcctctttaaaatccagctcgaggaattccgcgcccatactttgaacttgttctttcacttccggacgggtgtcgaatgcacgcacaatcgcgccgagactgtttgctgcgccaatggcggccagacctgcaacacccgcaccaatcaccatcacttttgccggtggcactttcccggccgcagtaatttgcccggtaaagaagcgcccaaattcatgtgccgcttcaacaatggcgcgataaccggcgatgttcgccatcgagcttagtgcgtccagcgattgtgcgcgtgagatacgcggcacagaatccatcgccatcacggtcacgttacgttccgcaagtttttgcattaattccggattctgcgcaggccagataaaactcaccagcgttgtcccaggattcagtaacgcaatttcatcatctaacggcgcattgaccttcagaatgatctctgactgccagacgctattcccttctacaatttcagcgcccgcttgcacaaacgctttatcgtcaaaacttgccagttgacccgcgccgctctctaccgcgacggtaaaacccagtttcagcagctgttccactgtttttggcgttgctgcaacacgggtttcattggttaaccgttctcttggtatgccaattcgcatgatattcccttccatcggttttattgatgatggtttgcctgtgtcaggagccacacaagccgctcatgtacgagctaaatgttactccgttaaaataaattagtaacaaacgccctataacgtactgaaaattatgcctgtgatctagcgccaaaaatcagtatttcggcgtgaactcgcaaaatattaacgattcagccgtgatagtgggataaacaccttagaacgccggataaagactgataattgtcttcgacggtcgggtaaaacgagacatcgccccggcacgattcactacttaacattaaattaacttatacaattcagttgcttcagtagtaatgatgctgatacggctgttttttaagcatagacggtcatttgagcaggattaaaattggcttaaggaatgtgatatgaaaaatgacgcagacagttacaccgtttaaatgcaataatcagccacgtttctcgttaataacaataccagtacctggtttgcgcaaggcgaaggattatttttatgaagcttaagaacaccctcctggcgtcggcactgctttctgctacggcattctccgttaacgcagcaacagaactgacaccggagcaagcggcagcggttaaaccttttgaccgtgtagtggttaccggtcgttttaatgctattggcgaagcggtgaaagccgtttctcgtcgcgcagataaagaaggtgccgcctctttttatgttgtcgacacttctgattttggtaacagcggtaactggcgtgtggtcgctgacctctataaagccgatgctgaaaaagcagaagaaacaagtaatcgcgtaattaacggtgttgtcgaactgccgaaagatcaggctgttctgattgaaccgtttgacacggtcaccgtccagggcttctatcgtagccagccagaagtcaatgatgccatcaccaaagcggcaaaagcgaaaggtgcctactctttctacatcgttcgtcaaatcgatgccaaccaaggcggcaaccagcgtattactgcattcatctataaaaaagatgctaagaaacgtatcgtccagagcccggatgtgatcccggcagattccgaagcaggacgtgcagctctggctgccggtggcgaagccgcgaagaaagttgagatcctaggtgttgcgactaccgcatcaccaagttctgaagtcggtcgtttctttgaaacccagtcatcaaaaggcgggcgttacaccgtcatgctcccggatggcactaaagtcgaagaactgaacaaagcgaccgcagcgatgatggtcccgttcgacagcatcaaattctctggcaactacggcaacatgaccgaagtctcctatcaggttgcgaaacgtgccgcgaagaaaggtgctaagtattaccacatcacccgccagtggcaggaacgtggtaataacctgaccgtcagcgcagatctgtataaataactattcagttactcctataaggcggcttgatgccgcctttcgcatttttagtcacaaatttccccgcgaccattgcatgcagacacatctcttcgtaaaatcccgcgcttcagtggcaaactccatttttatgcgttttgccctaatatttattcttcttatcacgttttaatcactggatatcgatggaaaagaaactgggactgagcgcactcaccgcgctggtattaagctcaatgctgggcgcgggtgttttcagtctgccgcaaaatatggcggcagttgccagcccggcagcactgctcatcggctggggtattactggcgctggcattttattgctggcctttgccatgctgatcctcacgcgcattcgtcccgaacttgacggcggtatctttacctatgcccgcgaagggtttggcgagctaatcggcttttgttccgcatggggatactggctgtgcgcagtcatcgccaacgtctcctatctggtgatcgttttttccgcgttaagcttttttacggacacgccggaattgcgcctgttcggcgatggtaatacctggcaatcgatcgtcggtgcatcagctttattgtggattgttcactttttgatcctgcgcggggtgcaaaccgctgccagcattaacctggtggcgacactggcaaaattgttgccgctgggtctgtttgttgtgctggcgatgatgatgttcaaactggataccttcaagctcgacttcaccggacttgcacttggcgtacccgtttgggaacaggtgaaaaacaccatgctgatcaccctgtgggttttcattggtgtggaaggtgccgtggttgtttctgcgcgtgcgcgtaataaacgtgatgttggcaaagcgacactgctggcggttctctccgctctgggcgtttacttgctggtaacgctgctttcgctgggtgtggtggcacgtcctgaactggctgaaattcgtaacccgtcaatggccggtctgatggtggaaatgatgggaccatggggcgaaatcatcatcgctgccggtttgatcgtttccgtttgcggcgcgtacttaagctggaccatcatggcggcagaagttccgttcctggctgccactcataaagcattcccacgcatttttgcgcgccagaacgcacaagctgcgccatccgcctcactgtggttgaccaacatctgcgtgcaaatttgtctggtactcatctggctgaccggttccgattacaacacgttgctgaccatcgcctcagaaatgattctggtgccctatttcctggtcggcgcgttcttgctgaaaatcgcaacccgtccactgcataaagcggtaggtgtcggtgcctgcatttatggcttatggttattgtacgcctctggtccaatgcacttgctgttatccgttgttctgtatgcgccggggctgctggttttcctgtatgcgcgcaaaacgcatacacatgataatgtactgaaccgtcaggaaatggtgctgattggcatgctgttaattgcctcagttccggcgacctggatgctggtgggataacgttcatcccatcgttggatagcaaaggagataacgatgggtaaagcccagcccttgccaatattaattactggcggaggtcgtcgcatcggcctcgccctcgcctggcatttcattaatcaaaagcaaccggtgattgtcagctatcggacgcactatccagccattgatggactgattaaggcaggtgcgcagtgtattcaggctgatttttcgaccaacgacggtgtgatggcgtttgccgatgaagtactaaaaagcccccatggtctgcgtgctattttgcataacgccagtgcgtggatggcggaaaaaccgggtgcgccactggccgacgtactggcttgcatgatgcagatccacgttaataccccatacctgctcaaccatgcgctggaaagattactgcgtgggcacggacacgccgccagcgatatcattcactttaccgattatgtggtggagcgcggtagcgacaagcatattgcgtatgctgcaagcaaagcggcactggataatatgacccgctcgtttgcccgcaagctggcaccggaagtgaaagtgaactctattgctccatcgctgatcctgtttaatgaacatgatgatgccgaatatcgacaacaggcgctgaataaatcactgatgaaaaccgcgcctggcgagaaagaagtgatcgacctggtcgattacttacttaccagttgctttgtcaccggacgcagtttcccacttgatggcggtcgtcatctgcgttaatgcagctttatccagcatataatcaacacccatgcgcttatcccccaacacgaaacagaaccaacaaaagcggcgggcaagcgcatcattccggtgaaataccacagcgacaccaggtaaacaaaatagggaataatcgaccacatactaaaaatgatggttgcgcgtaaggcttcaatgccgcgttcgctggcaacaatataatgcgcgataagcgcaaaggtcgggaaaagtggaatcagcccggcgatataataatttttcgtttttgctaaaacaccaatcaacagcactaccagcgcaccgagcgcggctttgattaccagccccatttttttaccttaacacttccataacaagtcatcagtagaatacctgatgaaaacttgtttagaaacgattgatagtaagtaaaaacagcgcggtgtattgtgacgtttttatatctaccgtgaatgttatgaacactatcgtatttgtggaagatgatgcggaagtcggttcactgattgccgcgtacctggcaaaacatgatatgcaggttaccgtagagccgcgcggcgaccaggccgaagaaaccattttgcgagaaaatccggatttggtgttactcgacatcatgctaccaggcaaggacggcatgaccatttgtcgtgatttacgcgcaaagtggtctggaccgattgttcttctaacctctctcgatagcgatatgaaccacatcctggcactggaaatgggtgcctgcgactatattctcaaaacgacgccccctgctgttttgctagcgcgtttacgtttgcatttgcgtcagaatgagcaagccacactgaccaaaggtcttcaggaaacgtctctgactccctacaaagccctgcatttcggcacgttgaccatcgatcccatcaaccgcgtagtcaccctggctaacactgaaatctcgctctcgacagctgatttcgaattattgtgggaattagctacccatgccgggcaaatcatggaccgcgatgcattgctgaaaaatttacgcggcgtcagttatgacggactggatcgtagcgtggacgtggctatttcgcggttaagaaaaaaactgctcgataacgccgcagaaccttatcgcattaaaactgtgcgtaacaaaggctatctttttgcgcctcatgcatgggaataagcgatgaaaaaactgtttatccagttttacctgttattgtttgtctgcttccttgtgatgtctctgctggttgggctggtgtacaaatttaccgccgaacgcgcgggcaaacagtcgctggatgatttgatgaacagttcactgtatctgatgcgcagcgaattgcgtgagatccccccacacgactggggtaagacgctgaaagagatggatttaaatctctctttcgatctgcgtgtcgagccactgagtaaataccatcttgatgatatttccatgcaccgactgcgtggcggcgaaattgtcgccctggacgatcagtacacgtttttgcagcgtatcccgcgcagccactacgtgctggcagttggtcctgttccttatctttattatctccatcagatgcgattgctggatatcgccctgatcacttttattgctatttccctcgcctttccggtgtttatctggatgcgtccgcactggcaggatatgttaaaactggaagcagcggcgcaacgatttggcgatgggcatctcaatgaacgtatccactttgatgagggttcgagctttgaacgacttggtatcgcatttaaccagatggcggacaatatcaacgccttgattgccagcaaaaaacagcttattgacggtatcgctcacgaactgcgaacaccgttagtgcgcctgcgttatcgactggagatgagcgataacctgagcgccgccgaatcccaggcgttgaatcgtgatatcagtcaacttgaagctttaattgaagagctgctgacttatgcccgactcgatcgcccacaaaacgagcttcatcttagcgaaccagacctgccgttgtggctgtcaacgcatctggcagacattcaggcagtaacgcccgataaaacggtacggattaaaacgctcgcgcaaggccattatgcggcgttggatatgcgcttaatggagcgcgtgctggataatttgctcaataacgccctgcggtactgccattcaacggttgaaaccagcctgctactgtcggggaatagagcgacattaattgttgaggatgatggcccagggattgccccagaaaaccgcgaacatatctttgaaccttttgttcgcctcgatcccagccgggatcgctcaaccggcggctgcgggctggggctggcaattgtccactctatagcactggcaatgggcggtacggttaattgtgacaccagcgaactgggtggtgctcgcttctcgtttagctggccgttatggcataacatcccgcaatttacctctgcctgacactacgcgcacgatggtcaagtcaccaccactgtgctataaaataagtatgttgtaactaaagtggttaatattatggcgcgttacgatctcgtagaccgactcaacactacctttcgccagatggaacaagagctggctgcatttgccgctcatcttgagcaacacaagctattggttgcccgcgtgttctctttgccggaggtaaaaaaagaggatgagcataatccgcttaatcgtattgaggtaaaacaacatctcggcaacgacgcgcagtcgctggcgttgcgtcatttccgccatttatttattcaacaacagtccgaaaatcgcagcagcaaggccgctgtccgtctgcctggcgtgttgtgttaccaggtcgataacctttcgcaagcagcgttggtcagtcatattcagcacatcaataaactcaagaccacgttcgagcatatcgtcacggttgaatcagaactccccaccgcggcacgttttgaatgggtgcatcgtcatttgccggggctgatcacccttaatgcttaccgcacgctcaccgttctgcacgaccccgccactttacgctttggttgggctaataaacatatcattaagaatttgcatcgtgatgaagtcctggcacagctggaaaaaagcctgaaatcaccacgcagtgtcgcaccgtggacgcgcgaggagtggcaaagaaaactggagcgagagtatcaggatatcgctgccctgccacagaacgcgaagttaaaaatcaaacgtccggtgaaggtgcagccgattgcccgcgtctggtacaaaggagatcaaaaacaagtccaacacgcctgccctacaccgctgattgcactgattaatcgggataatggcgcgggcgtgccggacgttggtgagttgttaaattacgatgccgacaatgtgcagcaccgttataaaccacaggcgcagccgcttcgtttgatcattccacggctgcacctgtatgttgcggattaacgcccggctttcatactgccgaccatctgttctggccgtacccagctgtcaaactcggcttcgctaagataccccagcgcaagggccgcagcttttaaggtcagcccttctttatgcgcttttttggcgatctccgcggctttgtcataaccaatgtgggtgttaagcgcagtcaccagcatcagcgattcattgagtaattgattgattcgctcacgattcggttcaatacccactgcgcagtgtttgttaaaactttccatgccatctgccagcaagcgcaccgattgcaggaaattgtggatcaccattggacggaagacgttcagttcaaagttaccggaagcgccacccatgttgatcgccacgtcgttccccattacctgacagcagagcatggttaatgcttcacactgggttgggttcactttccccggcatgattgagctgcccggctcattttccgggattgagatttcaccaattccgcagcgcgggccagaggccagccagcggacatcattggcgattttcatcagtgacgcagccaaccctttcaacgcgccgtgcgcctgaaccagggcatcacaggtcgcaagcgcttcaaatttgttcggcgcggtaacaaacggtgcacaggtaatgactgccagttcatctgctacgcgacgcgcatactccggatgggtatttagtccagtacccaccgctgtaccgccgagagccagttccgctacgtgaggcaggctgtattcgatatgtttgagattatgctcgagcatcgctacccagccggaaatctcctgccccagtgttagcggcgtggcgtcctgcaagtgggttcgaccgattttgacgatatcggcaaatgcacgcgatttttcactcagtgtctgtgtcagggttttaacctgcggaatgagttgcttgcgcagcgccagcagcgccgcaacgtgcatcgccgtcggaaagacatcgttggaactttggcttttgttcacgtcgtcgttagggtgaactttacgttccatcccgcgcacgccgccgagtaattcactggcccggttagccagcacttcgttcatgttcatgttactttgcgtgccggagccggtctgccagatagccagcgggaattcgtcgtcatgctgtcctgccagtacttcatccgccgcctgccgaatggcgctcgctttctcttcagacaacaagcctaaatcttcattaacttttgccgctgcgcgcttggttagcgccagcgcatgaatcagtgaggtgggcattttctccgtcgaaatgcggaaatgctccagcgagcgttgagtttgtgcgccccacagcttatctgccgggacatcaatcgcccccatcgaatctttttcgctgcgtactgtattcatggcctgctcctcacctgattaattttttctttctgttttgccttcgttaagcaacttttagctcacttattatttactatttgataacaaatgtttggtctttcgtgccatgtaaaaaaaccgccccgaagggcggtaatgccagtcagttaagcaactgactggctctttttcggggctgtggggtatttccagggcctctcctttaccactctcgggaaggccctttcccttctcgtcggtaatttcacaagttgtcccatacttgcaagatcgcgcatcagctccggtatacgtcccggtgaagcgccctgcaatgtcatcagcattctcatcaccattccgcatgattctgagaaactcagttgattcggccagtaacctttcagatgttccgccattttaatcatctgatatctcaccagattataagccagtaagacaccccacagctcttgctccacaagctccggctttttacttctcagcgtcagcctgctcagttgcatcgtctgttttatctccctgtatcccagttcgatttcccagcgatgactgtacagatccgccatttctcctccggggaagcgcatggcgtccgtcatcgacgtcagcagatggcagacttttcctttgcgcgtcacggtcagcaggcgggctgtcacttcatttcccagtcccggccacttttttcgtgcctgcgggctggttttcagcttcaccagatgatcgcctttacccagttttctgagctcttcatattgcgctccctttctgagaggtatcatccagtggcggtgttctcccgccaggctccaggcatttaacagtcccagtgagtaataacctttatccattaacgtcagagtgttatcgccggtttgttctataagttgctcagcaagctcattttcgctgttcttcatcgtgccgaaggctgcagccgtcagcagatggctggtcagttccatctggcagaccattttgacctgcgggtagagcgccgggttcccggcatgtgtctggcgggggaaggctgcatcgttctctggtgtatccggtgtgcgccagaacacaccatcgatggccagcagggtcaggccgcaccagtgcggatgcggcgtggcgttatgccagagctgcgctgttttcgtgaacacgcggcggacagcctcacttcccaggcgctggcgggcctgaataacggcactgggggcaacgaaggggcgattgcccggcagcatgatgtccaggcgattcacaatctggtgaagaggttctttacgctcaagcgccatgccaacaatacaccagaccatcatttcgaggggaagacggcgcttgcgtagcgttacagtacctgattcggcaaggcaacgagagatgagttcggggtcgaggtaatcccccagagaagtcagtgggttacgcagagaatcgtaacgggataccagatcaagagcctgtccaatgtgcataaaaaaatccggaaacaagtgagcgtttccggattcttacacagccactggatcggtcaactgatccttaactgatcggcattactccctggggacagtaaataaaagcaaagtacctctgggtttaagcgcaacctatggacaaacaggaaacaaggtttcagccggaaccgtccagtcagtcattggtgtcacttttatctatgaataattgtgattttgaccttagtctatgcgctccattcacgaaaattgcgcagataattattttgtgaaggctattatcctacacctgtaagaaaatccgcgcacaattgaagccagagtcttattttttatattgaaaaatatgttaatttaaacactatgagagatgatgcttaacttatcgtatttaatctattgtttaacgataatagattaaaaatagaaagagagtagtcccctactcttatatatccatgttggcgataatccctttgtatgtactgtgcatcatcgctattacaaatcctaataattcatttccacacaggataagtagatgaagaaaaaaattgaatcctaccagggtgctgcaggtggttggggtgctgttaaatccgtagcgaatgcagtacgtaagcagatggatatacgccatgatgttattgccatgtttgacatgaataagccagagggctttgactgtccgggttgtgcatggccagatcctaagcacagtgcgtcattcgacatttgtgaaaacggcgcaaaagcaatcgcctgggaagtcacggataagcaggtaaatgcctctttctttgctgagaatacggttcaatcattacttacctggggagatcacgagcttgaggctgcagggcgtctcactcagcctttgaaatatgatgccgtcagcgactgttacaagccattaagctggcaacaagctttcgacgaaattggcgcacgccttcaaagctatagtgatcccaatcaggttgaattctatacttcgggccgcacttccaatgaagctgcctttctttatcagctttttgcccgtgaatacgggagcaataactttcccgactgctccaacatgtgccatgaaccgacaagcgtgggtttggcagcgagtatcggtgtaggtaaagggaccgtgttgctggaagactttgagaagtgcgatttagtcatttgcattgggcataaccctggtacaaaccaccctcgcatgctgacttcgttgcgcgctttagtgaaacggggagcgaaaatgatcgccatcaatcctctacaggaacgtggcctggagcgatttaccgcaccgcaaaacccgtttgaaatgctgacgaactctgagactcagttggccagtgcctactacaacgtgcgcattggtggcgatatggcgttgctcaaggggatgatgcgcctgttaattgagcgcgatgatgctgcaagtgccgcaggtcggccctcattgcttgatgacgaatttattcaaacgcataccgtcggctttgacgagctacgccgtgacgttctcaattccgagtggaaagatatcgaacgtatttctggactaagtcagacacaaatcgccgaactggctgacgcatatgccgctgccgatcgcaccattatctgttacggaatggggatcactcagcacgaacatggtacccagaatgtacagcaactggtcaatctgctgttgatgaaaggtaacattggcaagcctggtgcgggtatctgcccactacgaggtcactctaatgtacagggcgaccgaaccgtcggtatcaccgagaaaccgtctgcagagtttctggctcgcctgggtgagcgctatggcttcaccccacctcatgcacctggacatgctgcaattgccagcatgcaagcaatatgcacggggcaggctcgagcattgatctgcatggggggcaactttgcactggcaatgccagatcgggaagcgagcgctgtaccgttaacgcaattagatttggcggtacacgtagccactaagcttaaccgctctcatctgctgaccgcacggcatagctatattctgccggttctggggcgtagcgagattgacatgcaaaaaagcggtgcgcaggcggtaaccgttgaggattcaatgtcgatgattcatgcctcgcgtggcgtgttaaaacccgccggtgtaatgctgaaatcagagtgtgcagtggtcgcgggaatcgcgcaggcagcactaccccacagcgtggtagcctgggagtatctggtggaagattatgatcgcattcgcaatgacattgaagctgtgttaccagagttcgccgactataaccagcgcatccgacatcctggaggttttcacctgataaatgcagctgctgaaaggcgctggatgacgccgtcaggtaaggctaatttcattaccagcaaagggctgttagaagatccctcttcagcgtttaacagtaagctggtcatggcgacagtacgtagccacgatcagtacaacacgacgatttatggtatggatgatcgctatcgaggggtattcggtcaacgagatgtggtctttatgagtgctaaacaagctaaaatttgccgtgtaaaaaacggcgaaagagttaatcttattgcgcttacgccagacggtaagcgcagctcacgccgcatggatagattaaaagtggtcatttaccctatggctgaccgctcactggtgacctattttccagaatcgaatcacatgctaactcttgataaccacgatccattaagtggcattcctggttataaaagtattccggttgaattagaaccatcaaattaattcgcctcctcatttcttctgctgtcatccgcacagcagaagaatttctcattgactattatcgcgcaatttgctcacattgattaaattaaaccacacactataagatataaacctctgcctacagctgtaagaaactccgctcagtactgaagtgccagtcctatttcctcttttctccagcctgttatattaagcatactgattaacgatttttaacgttatccgctaaataaacatatttgaaatgtatgcgaccacagtgaaaaacaaaatcacgcaaagagacaactataaagaaatcatgtctgtaattgtggttgtcttattactgacccttacgttgatagccattttttcggcaattgatcagctgggtatttcagaaatgggtcgcattgcaagagatcttacacatttcattatcaatagtttgcaagactgaaaataaacagcaaattataaatatgaaatgttaaaaaagtatcgataaaaactttattgttttaaggagataaaatgtcgctcgtttgttctgttatatttattcatcatgccttcaacgctaacattttagataaagattacgccttctctgacggcgagatcctgatggtagataacgctgttcgtacgcattttgaaccttatgagcggcattttaaagagatcggatttactgaaaataccattaaaaaatatctacaatgcactaacatccagacagtgacggtgcctgttcctgcgaagtttttacgtgcttcaaatgtaccgactggattgcttaatgaaatgattgcttatcttaactcggaagaacgcaatcatcataatttttcagaacttttgcttttttcttgcctgtctatttttgccgcatgcaaaggtttcattacactattaactaacggtgtgctatccgtttccggaaaagtgagaaatattgtcaacatgaagctggcgcacccatggaagctgaaagatatttgtgactgcctgtacatcagtgaaagcctgttgaagaaaaaactaaagcaagagcaaacgacattctcacagattctattagatgccagaatgcagcacgcaaaaaatttgatacgcgtagaaggttcagtcaataaaattgccgaacaatgtggttatgccagtacatcttattttatttatgcgttccgcaaacatttcggcaacagtccgaagagagtttctaaggagtaccgttgtcaaagtcacatgggtatgaatacgggcaacacgatgagtgctttagctatttgattatttgctaacgagtagtcaaccacgcacgctgcgtaagaattaaatggggcagccattccctgccccgcgttgtttttaggcgatatatttattgaaataaataagtgacatccatcacatatttatgcacttgcataacctgttgcagattatttatgatctcaattcggcattttgtcagtaaaatgcaataatttattaaatatcaataaattagttgtttatcggcgagaaattacttaatagaacagaaagtaatgtcaacgctttatggactgttatttccctttttttagctaaatctgctatctctttatgtgactaacttcacttacatccacttatttctcttcgtaaaattacttcggaattaagtacaataagaagaggaacatttatgaagtctgcattaaagaaaagtgtcgtaagtacctcgatatctttgatactggcatctggtatggctgcatttgctgctcatgcggcagatgatgtaaagctgaaagcaaccaaaacaaacgttgctttctcagattttacgccgactgaatacagtaccaaaggaaagccaaatattatcgtactaaccatggatgatcttggttatggacaacttccttttgataagggatcttttgacccaaaaacaatggaaaatcgtgaagttgtcgatacctacaaaatagggatagataaagccattgaagctgcacaaaaatcaacgccgacgctcctttcattaatggatgaaggcgtacgttttactaacggctatgtggcacacggtgtttccggcccctcccgtgccgcaataatgaccggtcgagctcccgcccgctttggtgtctattccaataccgatgctcaggatggtattccgctaacagaaactttcttgcctgaattattccagaatcatggttattacactgcagcagtaggtaaatggcacttgtcaaaaatcagtaatgtgccggtaccggaagataaacaaacgcgtgactatcatgacaacttcaccacattttctgcggaagaatggcaacctcaaaaccgtggctttgattactttatgggattccacgctgcaggaacggcatattacaactccccttcactgttcaaaaatcgtgaacgtgtccccgcaaaaggttatatcagcgatcagttaaccgatgaggcaattggcgttgttgatcgtgccaaaacacttgaccagccttttatgctttacctggcttataatgctccgcacctaccaaatgataatcctgcaccggatcaatatcagaagcaatttaataccggtagtcaaacagcagataactactacgcttccgtttattctgttgatcagggtgtaaaacgcattctcgaacaactgaagaaaaacggacagtatgacaatacaattattctctttacctccgataatggtgcggttatcgatggtcctctgccgctgaacggggcgcaaaaaggctataagagtcagacctatcctggcggtactcacaccccaatgtttatgtggtggaaaggaaaacttcaacccggtaattatgacaagctgatttccgcaatggatttctacccaacagctcttgatgcagccgatatcagcattccaaaagaccttaagctggatggtgtttccttgctgccctggttgcaagataagaaacaaggcgcgccacataaaaatctgacctggataacctcttattctcactggtttgatgaggaaaatattccattctgggataattaccacaaatttgttcgccatcagtcagacgattacccgcataaccccaacactgaggacttaagccaattctcttatacggtgagaaataacgattattcgcttgtctatacagtagaaaacaatcagttaggtctctacaaactgacggatctacagcaaaaagataaccttgccgccgccaatccgcaggtcgttaaagagatgcaaggcgtggtaagagagtttatcgacagcagccagccaccgcttagcgaggtaaatcaggagaagtttaacaatatcaagaaagcactaagcgaagcgaaataactaaaccttcatgcggcggatttttccgccgccttattgagcgagatagcgatgcacgttacagccaagccctccagttttcaatgtaatctcaaatgtgattactgtttttaccttgaaaaagagtcgcagtttactcatgaaaaatggatggatgacagcactctgaaagagttcatcaaacaatatatcgaagcgtctggcaatcaggtctattttacctggcaaggcggtgaacccactctggctggcctggattttttccgtaaagttattcactatcaacaacgctatgcaggccaaaaacgtatttttaatgcattacaaacgaatggcattttattgaataatgaatggtgtgcctttctcaaagaacatgaatttctggttggtatctcgatcgatggcccccaggagttacatgaccgttacagacgcagtaattcaggtaacggtacttttgcaaaagtgatagcagccatcgagcgtctgaaatcatatcaagtagagtttaatacgttaaccgtcattaataacgttaatgtccattaccctcttgaggtttatcattttttaaaatctatcggcagtaaacatatgcaatttatcgaattgctagaaaccgggacgccgaatattgatttcagtggtcatagtgagaacacattccgtatcattgatttttctgtgcctcccacggcttatggcaagtttatgtcaaccatttttatgcaatgggttaaaaacgatgtgggtgaaattttcattcgtcagtttgaaagctttgtcagccgttttttggggaatgggcatacaagttgtattttccaggagtcctgcaaggataatctggttgttgaaagtaatggagacatttacgaatgcgaccattttgtctatccacagtacaaaattggaaacattaataaatctgaactcaaaacgatgaacagtgtacaactgacagcgcaaaaaaaacggatttcagcgaaatgtcagcaatgtgcatataaacctatctgcaatggcggttgtcctaagcatcgtattactaaagtaaacaatgagactgtttcttatttttgcgaaggttataaaatccttttttcaaccatggtaccttatatgaacgccatggttgagttagctaagaacagagtaccgctttaccacattatggatgttgcaaaacaaatggagaataattaataatgctctcttttaactccattcttagcctccttcttatgaccttaacaaggcacccgacataaattcctgtcgggtgtttcgtcatcatcatcttcccttgcgaaaatcctggcttacgtggtatgcgtcagggcattagcaatacccttgattatcaatagcataaccataaccataaccactgaaaattaaaaatttctatatatttcatattgttaaatgatacttaaataaatttcatcagtaaatcattgccatagataatcattggatggcacaatcaattttcgctaatgataaccattcccattacgttttatatgttgatagcaaagtatctctgtctgctgaagcccttttggctgcgtaagaataataaaacttcagtgttgttaatcattattatcctcgcaatgatccttggcgtggttaaaattcaggtctggttaaacgactggaataatgattttttcaatgcgctaagccagaaagaaaccgataagctttggcagcttgttctttggttccctgccctgctggggatctttgtattaatatccgtaaacaaaacatggttaattaaactactgactattcgctggcgcgaatggttaacagattactaccttaatcgctggtttgcagataaaaactactacttcacgcagatctacggcgagcataaaaatacagataaccctgaccaacgtatcgctgaagacattctcttactgatcagcaaaacgctcagtctttcatttggcttcatccagtcacttagcatgctgatcacctttaccgttattctttggcaaagcgcgggtacgctctcattcactgttggtggaacagaatggaatatccaggggtatatggtctataccgtcgtgctcattgtgatcggtggaactttatttacccataaggtgggtaaacgtattcgtccgcttaatgtggaaaaacaacgtagcgaagcgacatttcgaactaatcttgtgcagcataataagcagacagaactgattgcgctaagcaatgctgagtctctacaacgccaggagttgcgcgacaattttcataccattaaagagaactggcatcgtttaatgaatcgtcagcggtggcttgattactggcaaaatatttattcgcgctcgcttagcgttcttccctactttctgttattgccgcagtttattagcgggcagatcaatctgggcggactgatgaaatcgcgccaggcatttatgctagtatcgaacaatttaagctggtttatttataaatatgacgaacttgctgaactggctgcggttatcgatcgcttgtatgagttccatcaactcactgaacagcgccctacgaataagcctaaaaattgccaacatgcggtacaagtggctaatgcgagtattcgtacgcctgataataagatcatattagagaacttgaactttcatgtttcgccaggcaaatggctattactgaaaggctactctggtgcgggaaaaaccacactgcttaaaacattatcccactgctggccgtggtttaaaggtgatatttcttctcctgctgacagttggtatgtgtcacaaacaccgttaatcaaaagcggcttactgaaagagattatttgtaaagcacttcccctgcccgtagacgataaatcgttgagcgaagtactgcatcaggttggtctggggaaattggctgcgcgtattcatgaccacgatcgctggggagatattctttccagcggcgaaaaacaacgtatcgccctggcacgattaattttacgacgtccgaaatggatatttcttgacgaaactacctctcatcttgaggaacaagaggctatacgcttactgcgtttagtgcgtgaaaaactacccacaagcggcgtcattatggttacacatcaacccggtgtctggaacctggctgatgatatttgtgacattagcacggttttataacaacaataaaagccctgctgtacggagatataaataaatgaagcgagttcttattcctggcgtcattttatgtggcgctgatgtggcgcaggccgtcgatgacaaaaacatgtacatgcatttttttgaagagatgacggtctatgctcctgtccctgtacccgtaaacggcaacacgcattacaccagtgaaagcatcgagcgtttaccgaccgggaatggcaatatcagcgatctgctgagaaccaaccctgcggtacgcatggattcaacgcaaagtacctcgttgaaccagggagatattcgccctgagaaaatctctattcacggtgcgtcgccctaccagaatgcctatttgattgacggtattagtgcaactaataacctgaacccagcgaatgagtccgatgccagtagtgcaaccaatattagcgggatgtcacaggggtattatcttgatgtcagcttactggacaatgtgacgctttatgacagttttgtgccggttgaatttggtcgcttcaatggcggggtaattgatgcaaagatcaaacgcttcaacgctgatgatagcaaggtgaaattgggttatcgcactacgcgttcggactggttaacatcgcatatcgatgagaataacaagagcgcatttaatcaaggctcttcaggaagtacttattactccccagattttaaaaagaacttttataccttgtcgtttaatcaggaactcgctgataacttcggcgttaccgccggtttatcgcgccgccagtctgatatcacccgcgcggattatgtttcgaatgacggcattgtcaccggtcgggcacagtataaaaacgttatcgatactgcattgagcaaatttacctggtttgccagcgaccgctttacccacgatttaaccttaaaatataccggctccagccgtgattataataccagcaccttcccgcagtctgatcgcgaaatgggtaataaatcctatggtctggcatgggatatggatacgcaactcgcatgggccaaactacgtaccaccgttggttgggatcatattagtgattatacccgtcacgatcatgacatctggtacaccgaactttcatgtacatatggtgatattacagggcgttgtacctgtggcggattaggacacatttcccaggctgtagataattacaccttcaaaacacgcctggactggcaaaaattcgccgtgggtgatgtttcgcatcaaccctacttcggcgcggaatacatctattccgatgcatggactgaacgccataaccagtctgaatcctatgtgattaatgctgcaggaaagaaaactaaccataccatttaccataaaggtaaaggcagcctgggaattgacaactacacgctgtatatggcggagcacattagctggcggaatgtgtcgttaatgcccggtgtgcgttatgactatgacaactatctgtcaaaccacaatatctccccgcgctttatgacggaatgggatatttttgctgatcaaacctcaatgattaccgccggttataaccgttactatggcgggaatattcttgatatgggattacgtgatatccgcaatagctggacggaatcggtatcaggtaataaaactctgacgcgttatcaggatttgaaaacgccttataacgatgaactggcaatgggattgcagcagaaaatcggtaagaacgttattgcgcgtgcaaactatgtttaccgtgaagcgcatgatcaaatcagcaaaagcagtcgtaccgacagcgcgactaaaaccaccattactgaatataacaacgatggcaaaaccaaaacgcattcgttcagcctcagttttgaactggccgaacccctgcatatccgccaagtagatattaacccacaaattgtctttagctatatcaagagcaagggcaacttgtcgttaaacaatggttatgaggagagcaataccggtgataaccaggtggtttataacggtaatctggtctcttacgatagtgttccagtggcagattttaataacccattaaagatctccttaaacatggatttcacgcatcaaccgagcgggttagtgtgggcgaatacgctggcctggcaagaagcgcgtaaagctcgcattatccttggtaagacaaatgcgcaatacatcagcgaatattcagattacaagcagtatgttgacgaaaaactggatagcagcctgacctgggacacccgcttgtcctggacgccacaatttctgaaacaacaaaacctgacgatcagtgccgatattctcaatgtactggatagcaaaaccgctgttgatacaacgaacaccggtgtggcgacctacgccagtggccgtactttctggcttgatgtcagcatgaaattttaatagttcggattttacttaaccgggtaaattcgcccggttttcgcatggagataattatgagaaacctctgtttcttactgacgttagtggcaactctgttgctccccgggcggctgattgccgccgccttaccgcaggatgaaaagttaattaccgggcaactggacaatggcttgcgatatatgatttatccgcatgctcaaccaaaggatcaggtaaatttatggctgcaaattcataccggttcattgcaggaagaagacaatgagcgcggcgtggctcattttgtagaacatatgatgtttaacggcacaaaaacatggccgggtaataaagtcatcgaaacatttgagtcaatgggcctgcgtttcggtcgcgatgttaatgcctataccagctatgacgaaacgctgtatcaggtgagtctgccgactacgcagaaacaaaatctgcaacaagtgatggcaatcttcagtgaatggagtaatgccgcaacctttgaaatactcgaagtagacgctgaacgcggcgtaattactgaggaatggcgtgcccatcaggatgcgaaatggcgcacctctcaggcgcgccgccctttcctgctggcaaatacccgtaatttagaccgtgaacctatcggcctgatggatactgtcgccacggtcacaccggcacaattgcgccaattttatcaacgctggtatcaaccaaataatatgacctttatcgtggtcggcgatatcgacagtaaagaagcgctggcgctgataaaggataatttaagtaagcttccggctaacaaagcagctgaaaatcgcgtctggccgacaaaagccgaaaaccacctgcgctttaatatcattaatgataaagaaaaccgagtgaacggcatcgcactctattatcgcctgccaatggtacaagtgaacgatgagcaaagctttgtcgaacaagctgaatggagcatgttagttcagctgttcaatcaacgtctgcaggaacgcatacagtcgggcgagttgaagactatttctggcggcactgcgcgcagcgttaaaattgcacccgattatcagtcgctgtttttccgtgtaaatgcacgagacgataatatgcaggatgctgcaaatgcattaatggcagagttggcaaccattgatcagcatggtttttctgctgaagaactcgatgatgtcaaatctacccgcctcacctggctgaaaaatgcggttgatcagcaagctgaacgtgatttacgtatgctgaccagtcgcctggcatccagctcattaaataatacgccgttcttgtcgccggaagagacatatcaactttcgaaacgtctgtggcagcaaattaccgtgcaaagtctggcggaaaaatggcagcagttaagaaagaaccaggacgcattttgggagcaaatggtaaacaatgagcttgccgccaaaaaagcattgtctcttgcggctatcctggcgctggaaaaagagtacgccaacaaaaagctggcggcttacatcttcccaggcagaaatttatcgttaacagtagacgctgacccacaggcggaaattagcagcaaagaaacgctggctgagaatctgacatcattaacactttccaatggtgccagggttattctggcaaaatccgcgggtgaagagcaaaagctacaaattactgccgtatctaataaaggcgatttaagtttccctgcgcagcaaaaatcacttatcgcgctggcaaataaagcagtaagcggaagcggcgttggtgagctctcctcttccagcctgaaacgctggagtgcggaaaattcggtaaccatgagcagtaaagtcagtggcatgaatacgttgctctccgttagcgcgcggactaataaccctgaacctggttttcagttgattaaccagcgaatcacccacagcacgattaacgacaatatttgggcatcgctacaaaatgctcaaattcaggcgttgaaaacgctcgaccagcgtccagcggagaaattcgcccagcagatgtatgagacgcgctatgctgatgaccgcacgaaattactgcaagaaaatcagattgtacagtttactgccgcagatgcgctggctgccgatcgccagttgttttcatctccagcggatatcacgtttgtcattgtcggtaatgtctcagaagacaaactcgtggcgttaattacgcgttacttaggatcaatcaaacactctgattcgccattagccgcaggtaaaccattaactcgcgcgacggacaacgcatcggttactgtaaaagaacaaaatgaacctgtggcacaggtttcacagtggaagcgttatgattcccggacacctgttaatctggcgacgcgtatggcgctcgatgcttttaacgtcgcactggcaaaagatctacgcgttaatattcgtgaacaggcatctggagcatacagcgtttcttctcgcctctcggttgatcctcaggccaaagatatcagtcatttgctggcttttacttgtcaaccagaacgacatgatgaactgttaacgttagcgaatgaagtgatggttaagcgtctggctaaagggatcagtgagcaagaactgaatgaataccagcaaaacgttcagcgcagcctcgatatccaacagcgtagcgttcaacaattagcgaacactattgtaaatagtcttattcaatatgacgatcctgcagcatggactgagcaggagcaattgttgaaacaaatgacggtagagaatgttaacactgccgttaaacaatatctttctcatccggtaaatacttatactggagtattattgccaaaataataacagccccgtcaacacatcgttggcggggattttagcaatattcgccatttttatgtaataattttataaatgcgttcaaaataataaccaggtactaatagtgatattttaaggtctgatttttacgtgaaaattcaggaggcacagaatgcgcataaaaataacagcataaaacaccttaccaccacccaagaatttcatattatattgtttttcaatgaaaaaatattattctcgtaatatctcacgataaataacattaggattttgttatttaaacacgagtcctttgcacttgcttactttatcgataaatcctacttttttaatgcgatccaatcattttaaggagtttaaaatggataagaagcaagtaacggatttaaggtcggaactactcgattcacgttttggtgcgaagtctatttccactatcgcagaatcaaaacgttttccgctgcacgaaatgcgcgacgatgtcgcattccagattatcaatgacgaattatatcttgatggcaacgctcgtcagaacctggccactttctgccagacctgggacgacgaaaatgtccacaaattgatggatttatccattaacaaaaactggatcgacaaagaagaatatccgcaatccgcagccatcgacctgcgttgcgtaaatatggttgccgatctgtggcatgcgcctgcgccgaaaaatggtcaggccgttggcaccaacaccattggttcttccgaggcctgtatgctcggcgggatggcgatgaaatggcgttggcgcaagcgtatggaagctgcaggcaaaccaacggataaaccaaacctggtgtgcggtccggtacaaatctgctggcataaattcgcccgctactgggatgtggagctgcgtgagatccctatgcgccccggtcagttgtttatggacccgaaacgcatgattgaagcctgcgacgaaaataccatcggcgtggtgccgactttcggcgtgacctacaccggtaactatgagttcccgcaaccgctgcacgatgcactggataaattccaggccgacaccggtatcgacatcgacatgcacatcgacgccgccagcggtggcttcctggcaccgttcgtcgccccggatatcgtctgggacttccgcctgccgcgtgtgaaatcgatcagtgcttcaggccacaaattcggtctggctccgctgggctgcggctgggttatctggcgtgacgaagaagcgctgccgcaggaactggtgttcaacgttgactacctcggtggtcagattggtacttttgccatcaacttctcccgcccggcgggtcaggtgattgcacagtactatgaattcctgcgccttggtcgtgaaggctataccaaagtacagaatgcttcctaccaggtcgctgcctatctggcggatgagatcgccaaactggggccgtatgagttcatctgtgccggtcgcccggacgaaggcatcccggcggtttgcttcaaactgaaagagggtgaagatccgggatacaccctgtacgacctctctgaacgtctgcgtctgcgcggctggcaggttccggccttcactctcggcggtgaagccaccgacatcgtggtgatgcgcattatgtgtcgtcgcggcttcgaaatggactttgctgaactgttgctggaagactacaaagcctccctgaaatatctcagcgatcacccgaaactgcagggtattgcccagcagaacagctttaaacatacctgataacgtttaacggtaacggtgtcccgaaacgaacccgtttcgggataatttccaaagtctgttcactggcattagcaacggaaaatattgttctgaatacgcttcagaacaaaacaggtgcggttccgacaggaataccgttttagggggataatatggctacatcagtacagacaggtaaagctaagcagctcacattactcggcttttttgccataacggcatcgatggtaatggctgtttatgaataccctaccttcgcaacatcgggcttttcattagtcttcttcctgctattaggcgggattttatggtttattcccgtgggactttgtgctgcggaaatggccaccgtcgacggctgggaagaaggtggtgtcttcgcctgggtatcaaatactctggggccgagatggggatttgcagcgatctcatttggctatctgcaaatcgccattggttttattccgatgctctatttcgtgttaggggcactctcctacatcctgaaatggccagcgctgaatgaagaccccattaccaaaactattgcagcactcatcattctttgggcgctggcattaacgcagtttggtggcacgaaatacacggcacgaattgctaaagttggcttcttcgccggtatcctgttacctgcatttattttgatcgcattagcggctatttatctgcactccggtgcccccgttgctatcgaaatggattcaaagaccttcttccctgacttctctaaagtgggcaccctggttgtatttgttgccttcattttgagttatatgggcgtagaagcatccgcaacccacgtcaatgaaatgagcaacccagggcgcgactatccgttggctatgttactgctgatggtagcggcaatctgcttaagctctgttggtggtttgtctattgcgatggtcattccgggtaatgaaatcaacctctccgcaggggtaatgcaaacctttaccgttctgatgtcccatgtggcaccggaaattgagtggacggttcgcgtgatctccgcactgctgttgctgggtgttctggcggaaatcgcctcctggattgttggtccttctcgcgggatgtatgtcacagcgcagaaaaacctgctgccagcggcattcgctaaaatgaacaaaaatggcgtaccggtaacgctggtcatttcacagctggtgattacttctatcgcgttgatcatcctcaccaataccggtggcggtaacaacatgtccttcctgatcgcactggcgctgacggtggtgatttatctgtgtgcttatttcatgctgtttattggctacattgtgttggttcttaaacatcctgacttaaaacgcacatttaatatccctggtggtaaaggggtgaaactggtcgtggctattgtcggtctgctgacttcaattatggcgtttattgtttccttcctgccgccggataacatccagggtgactctaccgatatgtatgttgaattactggtcgttagtttcctggtggtacttgccctgccctttattctctatgctgttcatgatcgtaaaggcaaagcgaataccggcgtcactctggagccaatcaacagtcagaacgcaccaaaaggtcacttcttcctgcacccgcgtgcacgttcaccacactatattgtgatgaatgacaagaaacactaaccatgtctgaatggttataagacaagggagcgataattcatcgctccctttttcgtgctcgctgtcgtattgacttaaccgggataagtacgagaatgagcgcacatctgtttaccggaaaccagcatatatggatatctgctcccgaaacgagaaattagcgattagaagaccagcgatactggttgcactggcacttttactgtgtagttgtaaaagcacgcctccagagtccatggtgacaccaccagcaggttcaaagccaccagccacgacgcaacaatcgtcacaaccgatgcgtggcatctggctggccacggtgtctcgcctcgactggccaccggtttcctcggttaacattagtaaccccaccagccgggcccgtgtacaacaacaggcgatgatcgacaaactggatcatctgcaacgtctcggtataaacacggtctttttccaggttaagccggacggtaccgccctgtggccatcgaaaattttgccatggtccgatcttatgaccggtaagattggtgaaaatccgggttacgatccgctgcaatttatgctcgacgaagcccacaagcgtgggatgaaagtacacgcctggtttaacccctatcgcgtatcggttaatacgaagcccggtactatcagggaactgaatagcactctgtctcaacaaccggcgagcgtctatgtgcaacaccgtgactggatcagaacgtctggcgatcgctttgtcctcgacccgggcatccctgaggttcaggactggatcacatcaatagtcgcagaagtggtttcccgctatccggtagatggcgtgcagtttgacgactatttctatactgagtcaccgggttcacggctaaatgataacgaaacgtaccgcaaatacggaggcgcatttgcgtcaaaagcagactggcggcgcaacaatactcagcagttaattgcaaaagtatcgcacaccattaaaagcattaagccgggagtcgaatttggcgttagcccggcaggcgtgtggcgtaaccgatcacacgatccgctcggttccgatacccgaggcgcggcagcctatgacgaatcctacgctgacacccgtcgatgggtggaacaaggattgctggattacattgctccccaaatttactggccgttctcacggagtgccgcgcgttatgacgtgttggcaaaatggtgggcggatgtcgttaaaccgaccaggacccgcctgtatatcggtatcgccttctataaagtgggtgaaccttcaaagatagagccagactggatgattaacggcggcgtaccggaactgaaaaagcagctcgatcttaacgatgcggtaccagaaattagcggcaccatcttgttccgtgaggactatctgaataaaccgcagactcaacaagcggtcagctatctgcaaagtcgttggggcagttaaactcccatgcttactttgtaacaagccggtgctttacccaccggcttgttacaccttgtgaaatatcccactagtaatcatgcttacataagtcaaattaaccacgcaattaaccacacttagttaaacagctataaatccctaataaaaatgtatgaatatgaaaaaccatacgatattcgctgtcaccgaaaaataattacgatgggctatactcttctgaagaacagtagcgtagattgaaactgtcctaagtcgcttatttcttttcagtatatcttcatatttcaggagaatatggtgcagttagtcaatctcgcacgttgcgttttgattccgtctgatttcccagccttataagggtgtgaattatggagatgtattttaaaagaatgaaagatgagtggaccggacttgtcgaacaggcagatccactcattcgtgctaaagccgcggaaattgccgttgcgcatgctcattatctgagtatcgagttttatcgaattgtccgcatcgacccgcatgccgaagaattcttgagtaatgaacaagttgagcggcagttgaaaagtgcgatggaacgctggattattaacgtgctttctgcccaggttgacgatgtcgaaaggctaatacaaatccagcataccgtcgcggaagtgcatgcccgcataggaattccggtagaaattgtcgagatggggtttcgggtgctgaaaaaaatcctctatccggtaatcttctcttcggattattccgccgcagaaaaacttcaggtctatcatttctcgattaacagtattgatatcgcgatggaagtgatgacccgcgcgtttacctttagtgacagtagtgcctcaaaggaagatgaaaattatcgtatcttctcgttactggaaaacgccgaagaagaaaaagaacggcaaatagcctcaatactttcatgggaaatagatattatctataaaatcctgctggattctgatttaggcagtagtttgccattaagccaggctgattttggcctgtggtttaaccataaaggtcgacattattttagtggcattgccgaagtaggccatatctcccgtctcattcaggatttcgacggtattttcaatcaaaccatgcgtaacaccaggaatttgaataacagaagtctgcgggtgaaatttttattacagataagaaataccgtatcgcagattattaccttgctgcgtgaattgtttgaagaagtatcgcgccacgaagtcggtatggatgtactaacgaaattacttaaccgccgtttcctgccgactatcttcaaacgcgaaattgcccatgccaaccggaccggtacaccgctgtcagtgctgattattgacgttgataaattcaaagagatcaacgatacgtggggccataacactggcgatgaaattctgcgtaaagtctctcaggccttttatgacaacgtccacagtagtgattatgtttttcgctacgggggcgatgaatttatcattgttttgactgaagcttctgaaaacgaaacgttacgtaccgcagaacgtattcgcagtcgggtggagaaaaccaaactgaaagccgcaaacggcgaggatattgccctctcactttccatcggtgccgccatgtttaatggtcatcctgactatgagcgcctcattcaaatagccgatgaagctctgtatatcgccaaaagacgaggtagaaaccgtgttgaactctggaaagccagtctttagatgcgccaggatgcagaggtaatcatgaagctaaccgatgcggaaaatgccgccgatggcatttttttccccgcccttgaacaaaatatgatgggcgcggtgttaattaacgaaaatgatgaagtgatgtttttcaaccccgccgcagagaagctctgggggtacaaacgtgaagaagtcattggcaataacattgatatgctgattccgcgggatttgcgtcctgcgcatcctgaatacattcgtcataaccgtgaaggtggtaaagcgcgcgtcgaggggatgagtcgggagctgcagctggagaaaaaagacggcagtaaaatctggacccgttttgcgctatcgaaagtgagcgccgaggggaaagtttattacctggcgctggtacgggatgccagcgtagaaatggcgcaaaaagaacagacccgacaattgattattgccgttgaccatctcgaccgaccggtgattgtcctcgatccggaacgccatattgtgcagtgcaatcgcgcatttaccgaaatgtttggttactgcattagcgaagccagcggtatgcagcccgatacactcctgaacattcctgaattccctgccgataaccgcattcgtttacaacagttgctatggaaaaccgcccgcgatcaggacgaatttctgctgttgacacgcaccggtgaaaaaatctggattaaagcctctatcagcccggtttatgacgtgctcgcgcatctgcagaacctggtaatgaccttctcggatatcaccgaagaacggcagatccgccagcttgaaggcaatattctcgccgccatgtgcagcagcccgccatttcatgaaatgggggaaatcatttgtcgtaacatcgaatctgttctcaacgaatcgcatgtttcgctgttcgcactgcgcaacgggatgccgatacactgggcgtcatcttcgcacggtgcagaagttcaaaatgcgcaaagctggtcagcgaccattcgtcagcgtgatggtgcgcctgcggggatcctgcaaattaaaacctcgtcaggagcagaaaccagcgcctttatcgaacgcgtggcagatatcagccagcatatggccgcgctggcgctggaacaggaaaaaagccgtcagcatattgaacaactcatccaatttgatccgatgaccggtctgccaaatcgcaataacctgcacaattacctcgatgaccttgtcgacaaagccgtctctccggtggtgtatctcatcggtgttgaccatattcaggatgtgattgatagccttggctatgcgtgggccgatcaggcattgctggaagtggtcaatcgctttcgtgaaaaactcaaaccggatcagtatctctgtcgtatcgaaggtacgcagtttgtcctcgtgagcctggaaaacgacgtcagtaacattacccaaatcgccgatgagctacggaatgtggtcagcaagccgataatgattgacgataaaccattcccgctaaccttgagtattggcatcagctacgacgtgggtaaaaaccgcgattacctgctctccactgctcacaatgcaatggattatattcgcaagaatggcggtaacggctggcagttcttcagcccggcgatgaacgaaatggtaaaagagcgtttggttttaggcgcagcgctgaaagaagcgattagcaataaccaactgaaactggtttaccagccgcaaatcttcgcagaaacgggtgaactgtacggcatcgaagcccttgctcgctggcacgatccccagcatggtcatgtacccccttcacggtttattcctctcgcagaagagattggtgaaatcgaaaatattgggcgctgggtcatcgcggaagcttgccgtcagttagcagaatggcgtagccagaatattcatatcccggcgttatccgtgaacttgtcggcgctgcactttcgcagtaatcagctgcctaatcaggtgtctgatgcaatgcaagcctggggtattgacggccaccagctgacggtagaaatcacggaaagcatgatgatggaacacgataccgaaatctttaagcgcattcagatcctgcgcgatatgggcgtgggcttatcggtagatgattttggcacgggcttttccggattatcccgcttagtcagtcttccggtaacggaaatcaaaattgacaaaagttttgtcgatcgttgtctgacggaaaaacgcatccttgccttacttgaagccattaccagcattgggcaaagcctcaatttaaccgtcgtggcggaaggcgtcgaaaccaaagagcaatttgagatgctacgcaagatccactgtcgcgttattcagggatatttcttttcccgccccctacccgccgaggaaattccaggctggatgagcagcgtgttaccgctgaaaatctgacaaattcctctcgcccgcactcgcgggttttcatttaacgtgacactgtcacttaaatactgtgatttcagctacgattccgggagattccttccttaacttcccctcttgcaccaaaactgcactacgctgcacaaatgttgatcaaaagttaaaaaatataactttaagccagcattctggcgcttatcccggcatggcatgagatctgcataagcggaaagcgcagcaatttttgtcttaatacaggaaccgtttatgtcggataccaccgaactggttgatttagccgtgatcttccctgatctggagatcgaattgaaatacgcctgcgctgataacatcacaggtaaagctatttaccagcaagcgcgttgtctgttacacaaggatgcgattaccgcgctggcgaaaagtatcagtatcgcccagctgtcaggcttacaactggtgatttacgatgcgtatcgcccacaacaagcacaggcgatgttgtggcaagcctgcccagacccgcaatatgttgttgatgtgacggtcggttctaatcacagccgtggcacggcgatcgacctgacgcttcgtgatgagcacgggaacatcctggatatgggcgcagggttcgatgaaatgcacgagcgctcccatgcctatcacccttccgtcccgcccgccgctcagcgcaatcgcctgttgctgaatgcgataatgactggtggcggttttgtcggtatctccagcgaatggtggcacttcgaattaccccaggcagcgagttaccctctgctcgctgatcaattctcttgttttatatcccctggcacacagcacgtcagttaatcaggaaactgtcatgaagagatcgatatcgtttcgtcccacattgctcgcgctcgtccttgccacaactttcccggttgcgcacgccgccgtaccgaaagatatgctggtgattggtaaggccgccgatccacaaaccctcgacccggcggtaacaatagataataacgactggacagtgacctacccgtcttatcagcggctggttcagtacaaaacggacggtgataaaggctcaaccgacgttgaaggcgatctggcaagtagctggaaagcgtctgacgatcaaaaagagtggacgttcaccctgaaggacaatgctaaatttgccgatggcacacctgtcactgccgaagcagtaaaactctcttttgagcggttactaaaaatcggccaggggccagcagaagcatttcccaaagatttaaagattgatactcccgacgaacatacggtgaagtttacccttagccaaccattcgcaccgttcctctacacgctagcgaatgacggtgcatccattatcaatccggcggtcttaaaggaacatgcagcggatgatgctcgcggcttcctcgcgcaaaataccgccggttccggaccatttatgctgaaaagctggcaaaaaggtcagcaattagttctggtgccaaatccgcattaccccggcaataaaccgaactttaagcgagtatcggtaaaaattatcggtgaaagtgcctcccgtcgcctgcagctctcccgtggcgacattgacattgccgatgcgctgccggtggatcaactcaacgccctgaagcaggaaaataaagtcaatgtggcagagtatccgtcactgcgcgttacctatctgtatctgaataacagcaaagcgcctcttaatcaggcggatctgcgtcgggccatttcctggtctaccgattatcagggcatggttaacggcattctgagtggtaacggaaaacagatgcgcggcccgattccggaaggcatgtggggctacgatgcgacggcaatgcaatacaaccatgacgaaacgaaagccaaagccgaatgggataaagtgacgagcaaacccaccagcctgacgtttctctactccgataacgatccgaactgggagcctattgctctggcgacacaatccagtctcaacaagctgggcatcaatgtgaagctggaaaagctggcgaacgccaccatgcgcgacagagtgggtaaaggtgattacgacattgcgattggcaactggagtccggattttgccgacccgtatatgtttatgaattactggtttgagtcagacaaaaaaggtctgccgggtaaccgctcgttctatgaaaacagtgaggtcgataagttactgcgcaatgcgcttgcgaccaccgaccagacgcagcgtacccgggactaccagcaggcacagaaaatcgtcattgatgacgctgcttatgtgtacctgttccagaaaaactaccaactggcgatgaacaaagaggtgaaaggctttgtgttcaatcccatgctggaacaggtcttcaatatcaataccatgagtaaataacgtgaccttctggagtattttacgccaacgctgctgggggctggtgctcgtggtggcgggcgtctgcgtgattacgtttattatctcgcatctgatccctggcgatccggcgcggttactggcgggtgaccgcgccagcgatgctatcgtggaaaatattcgccagcaactgggactggaccagccactgtatgtacagttttaccgctacttcagcgacctgtttcatggtgacctgggaacatccattcgtaccgggcgtccggtgctggaagagttgcgtatatttttcccggcgacgctggaactggctttttgtgccctgctgctggcactcctgattggcatcccgctgggcatactctctgcagtctggcgaaatcgctggctggatcatctggtgcgaataatggccattaccggaatctccacacctgcgttctggcttggactgggcgtcattgtgctgttttatggtcatctgcaaattcttcccggcggcggaaggcttgatgactggctggatccaccaacgcacgttaccggcttttatctgctcgatgcgctgcttgaaggcaacggtgaagtcttcttcaatgcgttgcaacatctcatcttaccggcattaacgctggcgttcgttcacctgggaattgtcgctcgccagatccgctcagcgatgctggaacaattgagtgaagactacattcgtaccgcccgggccagcggcttgcccggctggtatatcgttttatgttatgcgctacccaatgcgttgatcccatcgattaccgtattgggtctggcgctgggcgatttgttgtatggcgcagtgctcaccgaaaccgtttttgcctggcccggaatgggtgcatgggtagtaacatcaatacaggcgctcgacttcccggcagtgatgggctttgccgtcgtggtttcatttgcttatgtgctggtcaacctggtggtggatttgctctatttgtggattgatccgcgtatcggacgtggaggtggtgaatgatgctaagcgaggaaacgtccgccgtacgcccacaaaaacaaacgcgatttaacggtgcaaaactggtatggatgctgaaaggcagtccgctcaccgtgaccggcgcagtcatcattgtattaatgctattgatgatgattttttcaccgtggcttgcgacgcatgatcccaacgccattgatttaaccgcccgccttttgccgccttctgcggcgcactggtttggcaccgatgaagtgggacgcgatctgttcagccgcgtactggtcggcagtcagcaatcaattctcgccggattagtcgtggttgccattgcgggtatgattggttcgctactcggatgtctatccggtgtgcttggcggacgcgcagacgccatcatcatgcgcatcatggacattatgctgtcgattccttcgttggtactgacaatggcactggctgccgctctcgggccgagtttatttaacgccatgctggcgattgctattgtgcgaattcccttttatgtgcgcctggcgcgggggcaagcattagttgtacgccagtatacctatgttcaggcggcgaaaacctttggtgcgtcgcgttggcatctgatcagctggcatattttacgtaactccctgccgccgctgatcgtgcaggcatcgctggatatcggtagcgcgattttaatggccgccacgttgggatttattggcctgggtgctcaacaaccgagtgctgaatggggcgcgatggtagctaatggtcgcaactatgtactcgatcagtggtggtattgcgcatttccgggggcagcgattttgcttaccgccgtcgggtttaatctctttggtgatggtattcgcgatctgcttgacccgaaagcaggaggaaagcagtcatgacccaacccgttctggacattcaacagctgcatttgagtttccccggttttaacggttatgttcacgtgctcaacaatgtgtccttgcagattaaccgcggtgaaattgtcggtctggtgggagaatccggctcaggtaaatcagtcaccgcaatgctgattatgcgtctgctaccgacgggcagttattgcgtacatcgggggcagatttcactgctgggagacgatgttcttaacgctcgggagaaacagcttcgtcagtggcgcggcgcacgagtggcgatgatctttcaggaaccgatgaccgccctcaatccgacacgtcgaataggtcttcagatgatggacgtgatccgccatcatcaaccaataagtcgtcgggaagccagagctaaagcgattaccctgctggaagagatgcaaatcccggatgccgtggaagttatgtcgcgctatccgtttgagctttcaggtggtatgcgccagcgggtaatgattgcgctggcattctcctgcgagccgcaattgattattgccgacgaaccgactacggcgctggacgtcacggtacagttgcaggtactgcgtttgcttaaacataaagctcgcgccagtggaactgcggtactgttcatcagccatgatatggccgtggtgtcgcaactgtgcgatagcgtttacgtgatgtatgccggaagcgtaattgaaagcggcgtgacggcagacgttatccatcatccccggcatccgtataccattggtttgctgcaatgcgcaccagaacatggagtaccacgccagccattacccgccattccagggacggtaccaaacctcacccatttgcctgacggctgcgcttttcgcgatcgttgctatgcggcaggtgcacagtgtgaaaacgtcccggcgctgacagcgtgtggtgacaacaaccagcgctgcgcctgttggtatccgcagcaggaggtcataagtatctgacacgttattaacgttacgcgacgtccatatcaatttcccggcccgtaaaagctggcttggtaaaactacggaacatgttcatgcgattaatggtattgatttacagatccgccgtggtgaaaccttagggatcgtcggtgagtcaggctgcggcaaaagcaccctcgcacagcttttaatgggtatgctgcaaccgagccacgggcaatacatccgttcaggatcacaacgcattatgcagatggtgtttcaggacccgctctcttcgcttaatccgcgcttatcggtgtggcgcatcatcacagaaccgctctggatagctaagcgtagtagtgaacaacagcggcgagcgttggcaaaggagttggctgtgcaggtgggtattcgtccggagtatctcgaccgcctgcctcatgcgttctccggcgggcagcggcaacgcatcgccattgccattgccagagcactctcttcgcagcctgacgtgattgtgcttgatgagccaacctcggcgctggatatctccgtgcaggcgcagatcctcaatttactggtaacgctacaggaaaatcacgggctgacttatgtgctgatttcacacaatgtctcggtgatacgtcatatgagcgatcgggtggcggtgatgtatctcgggcagattgtagaactgggcgacgcgcagcaggtgctgacggcacctgcacatccatacacccgattattgctggattccctccccgccattgataaaccgctggaggaagaatgggcattatgtaaaacggatctgccgggaaaccgcacgttgccacaaggctgttttttctacgaacgttgccctctggcaacccacggatgtgaagtccggcaatcattagcaataagggaggacggacgtgagctccggtgctggcgggcgctgtagagatgctaacaacgcatcaggcattcacgcgcctgacgcgtcatccggcaatgctttacgatttcaactggtaatccagcgtaatttccgctttcagtacctgagaaaccgggcatcctgcttttgctttctggatgatgccgtcaaaggtagaggcatcaatacccggcaccgcaacttcactcttcagtgcgattttcgtaatcgcaaaatcggcatccactttatccagcgacacatcggcggtggtatcaatcgatgttggcgtgaatcccgcttcccccagcattaatgaaagcgccattgagaaacatgcggcatgcgctgcgccaatcagttcttcagggttggttcctttttcgccttcaaaacgcgtgttaaatccatacggctgttggttcagcacgccactctgggtggatactgttcccttcccgcgtttgatatcgccttcccagtgtgcctgacctttcttatggattgtcattgttgctctcctgtgggcttaaaaaggaaattatagactacgtgagaaacagcacgaggataagcaggatattccgaataaaatacggcgaaaatattacttctgcacttaaattaaattcccacaatagataaccgggaatatatatctcaagagatattgcatcaatatcaatcaactcaccacaataataatacatatcaatatcatggagttaaaatataaaaatcatcaaccaggactaatcttaacaacgaagcggcaaatatttgccatgctgaatgtgctttataaatctgcgatccgtagcagacaccataaatacacagacacggagaatcactatgtttacttattatcaggcagaaaattcaacagcagaacccgctctggttaatgccattgagcaaggccttcgggcagagcaaggtgttgtcactgaagatgacattctcatggagctgaccaaatgggtggaagcttctgataacgacatcctcagtgatatctaccagcaaacgatcaattatgtggtcagtggccagcaccctacgctttaaggtgctatgcttgatcggcaacctaatttaggggtttagcacgtgtttcttcgctacggcgatgttgtccttaaaactagcaacaggattgaggagttaaaatgaaatcgaaccgtcaggcacgtcatattcttggactggaccataaaatttctaaccagcgcaaaatagttaccgaaggtgacaaatccagcgtggtaaataacccaaccggcagaaaacgccccgctgaaaagtaattcataaccatcagtcctcaatgacgattaaacaccattgcctgcgcaatggtgtttttgtttttatctgctttatacttggggccgacgccctggcggtaaagcaaagacgataaaagcgtgccagggatggatattcaaaaaagagtgagtgacatggaaccaaaaacaaaaaaacagcgttcgctttatatcccttacgctggccctgtactgctggaatttccgttgttgaataaaggcagtgccttcagcatggaagaacgccgtaacttcaacctgctggggttactgccggaagtggtcgaaaccatcgaagaacaagcggaacgagcatggatccagtatcagggattcaaaaccgaaatcgacaaacacatctacctgcgtaacatccaggacaccaacgaaaccctcttctaccgtctggtaaacaatcatcttgatgagatgatgcctgttatttataccccaaccgtcggcgcagcctgtgagcgtttttctgagatctaccgccgttcacgcggcgtgtttatctcttaccagaaccgccacaatatggacgatattctgcaaaacgtaccgaaccataatatcaaagtgattgtggtgactgacggtgaacgtattctggggcttggtgaccagggcatcggcgggatgggcattccgatcggtaaactgtcgctctataccgcctgtggcggcatcagcccggcgtatacccttccggtggtgctggatgtcggaacgaacaaccaacaactgcttaacgatccgctgtatatgggctggcgtaatccgcgtatcactgacgacgaatactatgaattcgttgatgaatttatccaggctgtgaaacaacgctggccagacgtgctgttgcagtttgaagactttgctcaaaaaaatgcgatgccgttacttaaccgctatcgcaatgaaatttgttcttttaacgatgacattcagggcactgcggcggtaacagtcggcacactgatcgcagcaagccgagcggcaggtggtcagttaagcgagaaaaaaatcgtcttccttggcgcaggttcagcgggatgcggcattgccgaaatgatcatcgcccagacccagcgcgaaggattaagcgaggaagcggcgcggcagaaagtctttatggtcgatcgctttggcctgctgacggacaagatgccgaacctgctgcctttccagaccaaactggtgcagaaacgcgaaaacctcagtgactgggataccgacagcgatgtgctgtcactgctggatgtggtgcgcaatgtaaaaccagatattctgattggcgtctcaggacagaccgggctgtttacggaagagatcatccgtgagatgcataaacactgtccgcgtccgatcgtgatgccgctgtctaacccgacgtcacgcgtggaagccacaccgcaggacattatcgcctggaccgaaggtaacgcgctggtcgccacgggcagcccgtttaatccagtggtatggaaagataaaatctaccctatcgcccagtgtaacaacgcctttattttcccgggcatcggcctgggggttattgcttccggcgcgtcacgtatcaccgatgagatgctgatgtcggcaagtgaaacgcttgcacagtattcgccgctggtgctgaacggcgaaggtctggtactaccggaactaaaagatattcagaaagtctcccgtgcaattgcgtttgcggttggcaaaatggcgcagcagcaaggcgtggcggtgaaaacctctgccgaagctttgcaacaagccattgacgataatttctggcaagccgaataccgcgactaccgccgtacctccatctaagcctgcgcccggtagtgaagtttccgtggtgatcggcagttcgccgcaaatgtggctgaatctgcaaaacgcctggagtctggcagaggcagaaaaaacggtggatgtgtcgcgattacgccgtctggttacgcaataaaaaatggcaccttataaagcgccatttgaaactgatgacaaacgcaacattgcctgatgcgctacgcttatcaggcctacacgttcacttcaatctattgtatttgaagggttttcatgccggataaggcattcacgacgcatccgggatgaacaaagcccacgttgtctacaatatgaaaatggcgccttttacagcgccattttcagcttaaagttcaaaagagattatatcccttcttcactctcttttttcgcttctgccttctcgatttcacgataccagcgcggatggtgtttcttcgcccagcgacggctcaccttcccttcgatcatccctttaatcgaccctttcacccagaatgccatatacatatggatcaggatggcgtggatcaggatgatacccgcagccgcgtggatcagcaggctgtagcgaacaacctgcatcgggaagtactgcgcaaagtacggacgccagataatcaccccggtcaccagcagcacgaaaatcatgctcatgatcgaccagaacatcatcttttgcccggcgttgtacttaccaacatccgccactttgtgctcattgccttttaatacttcgacaatgttcaacagccacggaatatctttcttatccgggatgttgtgatgcacaaaacgcacaaacataaacatcagtgcgacgaaaatcgcaatgccgaagaacgggtgcaaaatgcgtcccatctgcggcgtaccgaaggtttgcgtcagccattgcagcgtcgggaagaagaacgaaatcccggacagcgccaccaggaagaagcaaatcaccacggtccagtgacaggcgcgatcaataaatttggtgcgcacaatcattttcgacttactcatgatgatcctcctcgtcatcgtccacttccttattcgggccaataccgatgtagtggaaaatcaacccggcaaaagtggcaataaagccagccgctgccagcggtttcaacgcgcctttccacaggcttaccgaggtgtcgatcttcggatctttcggcagaccgtaatacagctccggctgatcggcgtgatgcagcacgtacataacgtgcgtaccaccgacccctttcgggttgtagacgccagcatgttcgtaaccacgcgctttcagtttcgccacgcgctcttccgccagctccagcatctccttcttggtgccgaagtggatagccccggtcggacaggttttcacacaagccggttcctggccgacgctgacgcgatcgacgcagagcgtgcatttatatacccggttatcctctttgttgaggcgcggaatattaaacggacacccggcaatgcagtaaccacagccgatgcagttttccgactggaaatcgacaatcccgttagcgtactgaatgattgcaccagcagacgggcacgccttcaggcagccgggatcttcacagtgcatacagccgtctttacggatcagccactccagcttgccgttctgttcggtttcgctaaagcgcatcaccgtccaggacttggcgctcagatcggcggggttatcgtaaaccccgacgcagtgccccacttcatcacggatgtcgttccactccgaacacgccacctgacaggctttacagccgatacaggtggaaacgtcgataagttttgcgacttctgctttgtaatcacgcacctgagaaggcggcgtgatggagttagttgcggaccttttgataatatcctgcgtttccatagccatctgttcgcccccttacgccttctcgatgttgactaagaacgctttatattccggcgtttgcgagtttgcatcaccgacattcggcgtcagagtgttagcgatataacctttacgcgcgacaccctcaaagccccagtggattggaatacccaccgtttcaacctgctgaccgtttacattcagcggtttcagacggcgcgttaccaccgccaccgcgcggataaagccacgcttgcttgagacagtgacacgatcgccattattaatgcctttcgccgccgccagcgtttcgctgatttccacaaactgttccggctgagcaattgcgttgagcaatgcgtgcttggtccaggtgtggaagtgctcggtcagacgataggtcgtacccacatacgggaactgctcttttttacccatccgcagcgcgtcttgttcatacagacgaacaaccgggttagacaccacgttcggatgcagcgggttagtgcccagcggcgtttcaatcggctcgtagtgttccgggaacggaccttccgccattttgttgatggcaaacaggcgtcccatcccttccggctgcatgataaacggcccggttggcgtacccggtgcggcattgccgaagtccggaatatcgttacccgtccacttgctgccgttccactggatcagcatccgtttcggatcccacggtttaccattgatatccgccgaagcacggttgtagagcacgcgacggttgagcggccacgcccaggcccatcccagcgtattccccagaccggatgggtcggagttatcgcggttagccatctggttgccctgctctgtccagctaccggtgtagatccagcaagaagatgcggttgtaccgtcatcacgcagatgcgcaaagctactcagcaactgacctttcttcgcaatcagcacgccattagcgtcatagagatcttccagcgcatagccgttattctctttcgccacttcgtcagattgcggttcgtgcggctgcttgtagttccagctcatcttcatcagcggttctacgcctttaccaccttcggcctggtacagctcgcgcagatgatggtagatacccgccagaatttcgccgtcgttacgcgcttcgcccggcgcgtcctgacctttccagtgccactgcaaccagcgaccggagttagcgatagaaccatcttcttcggcaaagcaggtcgaaggcagacggaatacttcagtctgaatagacgccggatcgacatcgttcgactcgccgtggttctgccagaaggtagaggtttcagtcaccagcggatcgataaccaccatgtacttcagcttgctcaggcagctcaccactttgtttttgtccgggaaggacgcaaccgggttaaagccctggcagaagtaaccggtgactttgccttcgtccatcatgttgaaatacttgatgacgtcgtaggtctggtcccacttcggcagccagtcatagccccagttgttctctttctgcgcggcatcgccatagaaagatttcatcaggctaacgaagaacttcggatagttgctccagtagttcacctgatcagccagcgtcgctttcggcgtgttcgcttccagatacgactgcaaatcaacctgtttttctgacggaagcgtcagataacctggcaggctggtagagagcagacctaagtcagtcagcccctgaatgttggagtgaccacgcaatgcgttcacgccgccaccggccatacccatgttaccgagcagcaactggatcatcgccatagtacggatgttctgcgcacccacggtgtgctgcgtccagcccagcgcgtacaggaaggtggttgtgcgatccggtgcgctggtggaggccagcacttcacacactttcaggaagtcggcttttggcgtaccgcagatgttttcaacgacgtccggcgtgtagcgggaaacgtgcgctttcagcaggttccacacacagcgcggatgagtcagtgtttcatcgcgttttgcatagccgttttcatcgaactgatagttccaggacgacttatcatactggcgtttttcagcgtcgtagccgctgaacaggccgtcttcgaaagcaaaatcatcacgcaccagcaggctggcgttggtgtaatgtttaacgtattcggcgttgattttgttgttttcgatcaggtagcgcaaaacgccagacaggaacgtaatgtccgtaccggaacgaataggtgcgtaaatatccgccacagaagcggtacgcgtaaaacgaggatcgacaacgatcaaggttgcatcgttgttgtttttcgcttccatcgcccagcggaaaccgacgggatgcgcttcagcagcgttaccgcccattaccattacgacgttagcgtttttgatatccacccagtggttggtcatcgcaccgcgaccaaatgttggagcaagacttgctaccgttggtccgtgtcagacgcgcgcctggttgtctaccgccagcatcccgagggagcgggcaaatttctgggtcagcatcccggtttcgttgctggcaccggaggcacacagcataccggtagaaagccaacggtttaccgttacgccctgctcgttcttttcaataaagttagcgtcacggtcagctttcatcagcttcgcaatacgggagaatgcttcttcccagctaatgcgctgccatttgtcagaacctggcgcacgatattccgggtagcgcagacggttttcgctgttgacgtaatccagcaaaccggccccttttgggcacagcgcaccacggcttaccggatgatccgggtcaccttcaatgtgataaatcgcttctctggcgtttttcgcgccatcacccaggctatacatcaatagcccgcaacctacggaacagtatgtgcaggtgttacggatctctttagcgcgtaataatttgtagtttcgcgcctgagccagtgcttgcttcggggcaaagcccaatgccgctaccgttgttccagccataccgcccgcgcagattttaaaaaattgtctgcgactgacgtccattgctttcctcttttttcaggggtattactgcgcgaggaaactaacagtaaaattctgaatctttttgcgcgaaatcaaaaagaacacgtgtatgccacaaaataatccgcctgcgcaaattaacctacctcaatagcggtagaaaaacgcaccactgcctgacaggccagttaaaaaaatgctataaaattcagcttaatttttaacggcaagagagacaaaacagcgagcatgacacgacaaaaagcaacgctcatagggctaatagcgatcgtcctgtggagcacgatggtaggattgattcgcggtgtcagcgaggggctcggtccggtcggcggcgcagctgctatctattcattaagcgggctgctgttaatcttcacggttggatttccgcgtattcggcagattccgaaaggctatttactcgccgggagtctgttattcgtcagctatgaaatctgtctggcgctttccttagggtatgcggcgacccgtcatcaggcgattgaagtgggtatggtgaactatctgtggcccagcctgacaattctctttgccattctgtttaatggtcagaaaaccaactggctgattgtaccaggattattattagccctggtcggcgtctgctgggtgttaggcggtgagaatgggttacattatgatgaaatcatcaataatatcaccaccagcccattgagttatttcctggcgtttattggtgcgtttatctgggcagcctattgcacagtaacgaataaatacgcacgcggatttaacggaattaccgtttttgtcctgctaacgggagcatgtctgtggatttactattttctcacgccacaaccagaaatggtatttagcacgcccgtcatgattaaactcatctctgcggcatttaccttaggatttgcttatgctgcatggaatgtcggtatattgcatggcaatgtcaccataatggcggtaggctcgtattttacgcctgtactttcctcagcgcttgcagccgtgctgctcagcgccccgctgtcgttctcgttctggcaaggcgcgctaatggtctgcggcggttccctgctctgctggctggcgacacgtcgtggttaaaataattgccgggtctacggcccggcagttaatcagataaattccgacaatattaaaaaataaatttcaaataccagtaattcaccttatatctcatttcgacttcgatcacatatcgataaataatattatttcatctatttttctcattgtttttaatcaccattctattttaaaaacagtatgtcatttataaatgacgccgtttaaaattcgtttagaaaatacgtttaacgataattaaaaggattctgttaaatgaaattaaaaatagttgcggtggttgtaactggtttgttagctgcgaacgtagcacacgctgccgaagtctataacaaggatggtaataaactcgacctttatggcaaggttaccgctctacgttattttactgatgataagcgtgacgatggtgataaaacttatgcccgtctcggctttaaaggagaaacgcaaatcaatgatcaaatgattggttttggtcactgggaatatgattttaaaggctataacgatgaagccaacggctcgcgcggcaacaagacccgtctggcctatgctggtttaaaaattagtgaatttggctctctggactatggtcgtaactacggtgtcggctacgacattggttcatggaccgatatgttgccagaatttggtggcgatacctggagtcagaaagatgtcttcatgacataccgtaccaccggtctagcaacctatcgcaactacgatttctttggcttaattgaagggctgaactttgccgcgcaatatcaaggcaaaaatgaacgtactgacaacagtcatctttatggtgctgactacacgcgtgccaacggtgacggtttcggtatctcctcaacttatgtttatgatggctttggtatcggtgcggtatataccaaatccgatcggacaaatgcgcaggaaagagccgctgctaatcctctcaatgcctccggtaagaatgcagaactatgggccacaggtataaagtatgatgccaacaacatctactttgcagctaattacgctgaaacattaaacatgaccacctatggggatggttatatctctaacaaagcacaaagttttgaagtggtggcgcaatatcaattcgacttcggcttgcgcccatcactcgcttacctgaaatcgaaaggcagagatctgggccgctacggcgaccaggacatgattgagtatatcgacgttggtgcgacgtatttcttcaacaaaaatatgtcgacctatgttgattataaaatcaacctgattgatgaaagcgactttacccgtgccgtagatattcggaccgataacatcgtcgctacgggcattacctatcagttctaacgtcctctcctgaccagcccttctctgggctggtttttgatttaagtgctgctgtatgactccttaagtaaaaatgagcaatttttgatatttctggtcattcacctcaattaatattattccatatcctccggggacatcttactataatatttattgatgagtgattatgaccaatattaatacagcttgtgtaaaaaataatgccagttatcaacttaataacgcattacctaacaaagaaaccatctccagcaatttttgtgaacgactagaacaatggggtaataaatcggttaataatggtgaagaaagagcaattgccgtggagcgaattaaagaagcttacaattcgaacatggcatctcttgatttgtcatatcttgatttgagtgaattaccgcctatcccctcgacagttaatacgttaaatctggaaaacaattgtctaacttgtcttgacttagctgacaatgccagtctcgttaatatcaacctcagcgttaataaaattaacacgataacctttccaaaagaatcaaaactggaaaacatttatattgatcataacaatctggaaagtttagatttaaaaaatcagcattcattggttaatctggaagcgcaaaataacaaactgacaaaaattaatatttctgatagttataaactgaaatttcttaatcttgattataacaagctagcatcgctggatgtctcccggcaagaatctctgattgagttaagtgcccatcacaatatgatcactgaccttatattacacaatcatcccaggatgaaaacaatcactttaaacgacaaccatattgcacatttaaacgccaaaaacactacaaaactggaatatttaaacttaagcaataacaatttactgccaaccaatgacattgatcaactaatatcatcaaaacatctttggcatgtattagttaacggcatcaacaatgatccacttgcacaaatgcagtactggactgcagtaagaaatataattgatgacactaatgaagtgaccattgatttatcaggacttaatttaaccactcaaccaccagggctgcaaaacttcacatctatcaatcttgataataaccaactcacacattttgatgcaaccaactacgatagactcgtaaagctaagtctgaatagtaatgctcttgagtcaataaattttcctcaaggcagaaatgtaagtattacacatatatctatgaataataatgctctcagaaatattgatatagataggctttcatcagttacttattttagtgcggcacataatcaactaaatagctgcgcggaatagtagatcactttgagggaacttagcccggattgtgcgatctgatcaatcgccaaatcaaaacaaatcaccaaccggactgagcaatgccgatcatagcaccaatttcccgtgacgaacgacgcctgatgcagaaagccatccataaaacacacgataaaaattatgcccgcagactgactgccatgctgatgctgcaccggggcgaccgtgtcagcgacgttgccagaacgctctgctgcgcccgttcctctgttggacgctggattaactggttcacgcagtcgggtgttgagggactgaaatcattacctgccgggcgtgcccgtcgctggccgtttgagcatatctgcacactgttacgtgagctggtaaaacattctcccggcgactttggctaccagcgttcacgctggagtacagaactgctggcaataaaaatcaatgagataaccggttgccagttaaatgccggaaccgttcgccgctggttgccgtctgcggggattgtgtggcgaagggctgcgccaactctgcgtatccgtgacccgcataaagatgaaaagatggcagcaatccataaagcactggacgaatgcagcgcagagcatccggtcttttatgaagatgaagtggatatccatcttaatcccaaaatcggtgcggactggcaactgcgcggacagcaaaaacgggtggtcacgccgggacagaatgaaaaatattatctggccggagcgctgcacagcgggacaggtaaagtcagctgtgtgggcggcaacagcaaaagttcggcgctgttcatcagcctgctgaagcggcttaaagcgacataccgtcgggcgaaaaccatcacgctgatcgtggacaactacattatccacaaaagccgggaaacacagagctggctgaaggagaacccgaagttcagggtcatttatcagccggtttactcgccatgggtgaatcatgttgaacggctatggcaggcacttcacgacacaataacgcgtaatcatcagtgcagctcaatgtggcaactgttgaaaaaagttcgccattttatggaaaccgtcagcccattccccggaggcaaacatgggctggcaaaagtgtagcggtattaagcgcagctatttagagtttgtgcaattagaatcttgcgaatgtctgcaatacctgaatctcagccataatcaattatctgatattgttgcaggtaataaaaattaactcttactgctggatctatcccataataaactaacaagtttacacaatgtcttatttcccaacttgaatacgttacttattaacaaaaacctgctttctgaaattaaaatattctatagcaacttctgcaatgttcagacattaaacgctgctaacaaccagttgaaaaatataaatcttgatttcctgacttgtcttccatctattaaaagtttaagactggacaacaataaaataacccatattgatactaataatacatccgatattggaactttatttcccataataaaacagagcaaaaacttaaattttttaaatgtttctgggaagaacaattgccctactatgcagctcatgttatttaatttgttttccccaacacttaagcttaatactggcctggcaattctttcgcctggtgcatttgaagttcactctgacggaatagatgtggataacgaattgtttcactatcctattaaaaatagcatataccccatataatatacacacttacaagacagaggaagttgtaaaccagaggaatataaaagttaaaaacatgaccttagatgaaataaacaatacttactgtaataacgattattacaatcaggcaataagagaggaaccgatagaccttctggacagatcgttttcctccagttcatggcctttttagtgaataaatcatcactaattctataagtgtctggtcttgttgataatatagttaatatgtaaccctttagattcacgatctgaagggttgaaacatgacatacgttcaaagattaaccccgtttgaaggttagcttgttagttacatttagtaacacatatctggctacttaatccccattctgcccccgcggttacgctttcttatctattctttcaatcagcacttcacccaattcatccttaattctaataactggctattgcgccttacctcctgttttgtcttttttcattaccaatgtgtgcatgtgaggaacaatatggcactgcaaaatgagaaaaatagtcgttatcttttacgcgactggaaaccagaaaatccggccttctgggaaaataaaggaaaacatattgctcgaagaaacctctggatatcagtcagttgtctacttcttgccttctgtgtctggatgctatttagcgcagttaccgttaatctcaataaaatcggttttaattttactaccgatcaactctttttattaaccgcattaccctccgtttctggcgcattattgcgtgttccctactcctttatggtgcctatattcggtggacgccgatggacggtttttagtactgcaatcctgattattccttgcgtctggctcggaattgccgtgcaaaatccgaatactccttttgggatatttatcgttatcgctttgctatgcggttttgcaggtgcaaactttgcttcgagcatgggcaatatcagtttcttctttccaaaagccaaacaagggagcgctcttgggattaatggcggattaggaaacttaggtgtaagtgtaatgcagctggttgcaccgctggtcatttttgtacctgtatttgcctttctcggcgtcaatggcgtaccgcaggccgacggttcggtgatgtcgctggcgaatgccgcatggatttgggtaccgctactggcgattgccacgatcgccgcctggtcagggatgaatgatatcgccagttcacgcgcctcaattgacgaccagctccctgtcttacaacgcctgcatctctggctgctgagcctgctttaccttgccaccttcggttcgtttatcggtttttctgcgggttttgccatgctggcaaaaacccagttcccggatgtgaatattctgcgcctggcgttctttggcccatttatcggtgccatcgcgcggtcggttggtggtgctatttccgataaattcggcggcgtgcgggtgacgttgatcaactttatttttatggcgattttcagtgccctgctgttccttaccttaccgggcacaggctccggtaatttcatcgccttttacgccgtatttatggggctgtttctgactgcgggtctgggaagtggttctactttccagatgatcgccgtcatctttcgccagataaccatttatcgggtgaagatgaaaggcggtagtgatgagcaagctcagaaagaagccatcaccgaaacggcggcggctctgggctttatctcagccattggcgcagtgggcggcttttttattccgcaggcgtttggcaagtcgctcaatatgaccggctctccggtcggcgcgatgaaagtgtttttaatcttctacatcgtttgtgtgctgctgacctggctggtttatggtcggcggaagttcagccaaaaataagagatcgatgcctgatgtacaaccgtgtcgcatccgacaaggcatcagatcccaattcattcctggagcaggagtcatgtcatgagtaaacttttggatcgctttcgctacttcaaacaaaagggcgaaacctttgccgatggtcacggacaggtgatgcatagcaaccgcgactgggaggacagctatcgccagcgttggcagttcgacaaaatcgtgcgttccacccacggtgttaactgtacaggctcctgtagctggaaaatctacgttaaaaatggtctggtgacctgggaaatccaacagaccgactacccgcgcactcgccctgaccagcccaatcatgaacctcgcggctgcccgcgtggcgcaagttactcctggtatctctacagcgctaaccgcctgaaatacccgctcattcgtaaacgactgattgaactgtggcgtgaagctctcaagcaacacagcgatccggtactggcgtgggcatcgattatgaacgatccgcaaaagtgcttaagctacaaacaagtgcgtgggcgcggcgggtttatccgctccaactggcaggaacttaaccaactgattgccgccgctaacgtctggaccatcaaaatctatggtccggatcgcgttgccggtttctcgccgatcccggcgatgtcgatggtgtcatacgctgccggaacgcgttatctgtcgctgttaggcggcacctgtttaagcttctacgactggtattgcgacctgccgcccgcctcgccgatgacctggggcgaacaaaccgacgtgccggaatctgccgactggtataactccagttacatcatcgcctgggggtctaacgtaccgcagacacgtacgccggacgcccacttctttaccgaagtacgttacaaaggcaccaaaactatcgccattacccctgactactctgaagtggccaaattgtgcgaccagtggctggcaccgaaacaaggcactgatagcgccctggcgatggcaatgggccatgtgattttaaaagagtttcatctcgataatcccagcgactactttatcaactactgccgccgctatagcgacatgccgatgctggtaatgctggaacctcgcgacgatggtagctacgtacccgggcgcatgatccgcgcgtctgacctggtagatggactaggcgaaagcaataatccgcagtggaaaaccgtggcggttaataccgcaggtgaattggtagtgccgaatggttcgattggtttccgctggggagaaaaaggcaaatggaatctggaatccattgccgccggtaaggaaaccgaattgtcgttaaccctgctcggtcaacatgacgctgttgcaggcgtggccttcccctactttggcggcattgaaaatccgcattttcgcagcgtaaaacacaatccggtgctggtgcgccaattgcccgttaaaaacctgacgttagtcgatggcaacacctgtccggtggtcagcgtttatgatttggtgctggcgaattacggcctcgatcgcgggctggaagatgaaaacagcgcgaaagattacgctgaaatcaaaccgtacaccccagcctggggtgagcaaattaccggcgtaccgcgccagtatattgaaaccatcgcccgcgaatttgccgataccgcccataaaacgcatggacgctcaatgattatcctcggcgctggcgtcaaccactggtatcacatggatatgaactaccgtgggatgatcaatatgctgatcttctgcggttgtgtcgggcaaagcggcggcggctgggcgcactatgtcggtcaggaaaaactgcgcccacaaaccggctggttgccgctggcctttgcgctcgactggaaccgcccaccgcgccagatgaacagtacctcgtttttctacaatcattccagccaatggcgctatgaaaaagtctctgctcaggagttactttcaccgcttgccgatgccagtaagtacagcggtcatctgattgatttcaacgttcgcgccgaacgcatgggctggctaccttctgcgccgcagctggggcgtaacccgctcgggattaaagctgaagccgacaaggccggattatcccccacagaatttaccgcccaggcgctgaaatcgggcgatttacgtatggcctgcgaacaaccagatagcggcagcaatcatccgcgtaatttgtttgtctggcgctctaacctgcttggctcctccggcaaaggccacgagtatatgcagaagtatctgctggggaccgaaagcgggattcagggcgaggaactcggtgccagcgacgggatcaaaccggaagaagtcgagtggcaaactgcggcgattgaaggcaagctcgacctgctggtgacgctcgacttccgcatgtccagtacctgcctgttctccgatatcgttctgcccaccgccacctggtacgaaaaagacgatatgaacacctcggatatgcatccgtttattcatccgctttctgcggcggtcgatccggcgtgggaatcacgcagcgactgggaaatctacaaaggtatcgccaaagcattttcgcaagtgtgcgtgggtcatcttggcaaagaaaccgacgtggtattacaacccctactgcatgactctccggcagagctctcacagccgtgtgaagtgctcgactggcgcaaaggcgaatgcgatctgattccaggcaaaaccgcgccgaatattgtggcggtggagcgcgactaccctgctacgtatgaacgctttacctcgctcgggccattgatggacaaacttggcaatggtggtaaagggatttcgtggaatacccaggatgaaatcgatttcctcggcaaactcaattacaccaagcgtgatggcccggcacaggggcgtccgctgattgacaccgccattgacgcttcagaagtgattctggcactggcaccggaaaccaacggtcatgttgcagtcaaagcgtggcaggcgctgggcgagatcaccgggcgcgaacatacccatctggcgctgcacaaagaggacgagaagattcgctttcgcgatattcaggcgcagccgcgtaaaattatctccagccccacatggtccggtctggaaagcgatcacgtctcctataatgcgggatacaccaacgttcatgagttaattccgtggcgcacgctgtcgggacgccagcagctctatcaggatcatccgtggatgcgtgcttttggtgaaagcctggtggcttatcgcccgcctatcgacacccgtagcgtcagtgagatgcgccagatcccgccaaacggcttcccggaaaaagcacttaacttcctgacgccgcaccagaaatggggcattcactcaacctacagtgaaaacctgctaatgctgacgctctctcgcggtggaccgattgtctggatcagcgaaaccgatgcccgagaactgaccattgtcgataacgactgggtggaagtctttaacgccaacggcgcgctgacggctcgtgcggtggtcagccaacgtgtaccgccgggtatgaccatgatgtatcacgcccaggaacgcattatgaatattcctggttcggaagtaactggcatgcgcggcggcattcataactcggtcacccgtgtttgcccgaaaccgacgcatatgattggcggttacgcgcagctggcctggggctttaactactacggcaccgtcggctcgaaccgcgacgaattcatcatgatccgcaagatgaagaacgttaactggctggatgatgaaggtcgcgatcaggtacaggaggcgaaaaaatgaaaatacgttcgcaagtcggcatggtgcttaacctcgacaaatgtatcggttgccatacctgttcggtgacctgtaaaaacgtctggaccggacgcgaaggcatggagtacgcatggtttaacaacgtcgaaaccaaaccgggcattggttatccgaaaaactgggaagatcaggaagagtggcaaggcggctgggtccgcgatgtgaatggcaagatacgcccgcgtctgggcagcaagatgggcgtaataaccaaaatcttcgccaacccggtggtgccgcagattgatgattactacgaacctttcaccttcgactacgaacatttgcatagcgcaccggaaggcaaacatatccctactgctcgcccgcgttcgctgattgacggtaagcggatggacaaagtgatctgggggccaaactgggaagaactgctgggcggcgagtttgaaaaacgtgcccgcgaccgcaacttcgaggccatgcaaaaggagatgtacgggcagtttaaaaacaccttcatgatgtacctgccgcgcctgtgcgaacactgcctcaatcccagttgcgtggcgacctgcccaagcggcgctatctacaaacgcgaagaagacggcattgtgctgattgatcaggataaatgccgtggctggcgtttgtgcattagcggttgtccgtacaaaaaaatctacttcaactggaaaagcggcaagtcagaaaaatgtatcttctgttatccgcgaattgagtcaggccaacccaccgtgtgctcagaaacctgcgtgggtcgcatccggtatctgggcgtgctgctttacgacgccgaccgcattgaggaagcggcgagcaccgagcgcgaagttgacctctatgaacgtcagtgcgaagtgttcctcgatccacacgatccctcagtgatcgaggaagccctgaaacaaggtattccacaaaacgtgattgaagctgcccagcgttcgcctgtctacaaaatggcgatggactggaaactggcgctaccgctgcaccctgaatatcgcaccctgccaatggtctggtacgttcctccgctgtcgccgattcagtcctacgcagatgcgggcggtttgccgaaaagcgaaggcgtgctgcccgccatcgaaagcctgcgtattccggtgcaatatctcgccaatatgttgagtgccggcgataccggtccggtactgcgggcgctgaaacggatgatggcgatgcgccactatatgcgttcacaaaccgtggaaggcgttactgatactcgtgccatcgacgaagtaggcctgagcgtcgcccaggtcgaagaaatgtatcgctatctcgccattgccaactatgaagatcgttttgttatcccgaccagccatcgggaaatggcgggcgatgccttcgcagaacgcaacggctgcggttttacctttggcgacggttgccacggttcggacagtaaattcaacctgttcaacagtagccgtatcgatgccatcaacatcaccgaagtgcgcgacaaagcggagggcgaataatgcagatcctcaaagtgatcggcctgttgatggagtatccggatgagctgttgtgggaatgcaaggaggacgcgctggcgttgatccgccgcgacgcgccgatgcttacggatttcacccacaacctgcttaacgcgccgctgctggataaacaggccgaatggtgcgaagtgtttgaccgcgggcgcaccacgtcgctgctgctgttcgaacatgttcatgccgagtcccgcgatcgcggccaggcaatggtggacctgctggcggagtatgaaaaggtcggcctgcagctggattgtcgggaactgcccgattatctaccgctgtatctggagtatttaagcgtactgcctgacgatcaggcgaaagaaggattgctcaatgttgcgccgatcctcgccctgcttggcggtcgcttaaaacaacgcgaggcaccgtggtacgcgttgtttgatgctctgctgcaactggcgggaagtatactttcaagtgacagtgtcacaaaacaagtaaacagcgaagagcgcgatgacacccgccaggcgcttgatgcagtgtgggaagaggaacaggtgaagtttattgaagataacgccacggcgtgtgacagctcgccgcttaatcaatatcagcgacgctttagccaggatgtcgcgccgcagtatgtcgacatcagtgcgggaggtgggaaatgattcagtatctgaacgtctttttttacgatatctacccgtacatttgtgcgacggtgtttttcctcggcagctggctgcgctacgactacgggcagtacacctggcgcgcctcctcaagtcaaatgctcgataaacgcgggatggtgatatggtcgaatctgttccatatcggcattttggggattttcttcgggcacttgttcggcatgttaacgccgcactggatgtacgcgtggtttttgccagtggcagcgaaacaactcatggcgatggtgctcggcggtatttgcggtgtgttgacgttgattggcggcgcaggactgctgtggcgcagtctgacaaatcagcgcgtgcgtgccacttccactacgccggatatcatcatcatgagcattttgctgatccagtgtctgttggggctaagtaccataccgttttcagcacagtatcctgatggtagcgaaatgatgaagctggtgggttgggcgcaaagcattgtcactttccgtggtggatcgtcagagatgctcaacggcgtagcgttcgtcttccgcctgcatctggtgttgggaatgaccatcttcctgctcttcccgttcacccgactggtgcatgtgtggagcgcgccgtttgagtactttactcgtcgatatcaaattgtgcgttcgcggcgataatttcaccctggccggatagcccttcgctctccggccacttgcaggctatgatagttctccagtcacaggagaacgttaatgaaaccgcaggtgtaccacgtcgatgcttttacctctcaaccatttcgcggcaattctgccggtgttgttttccccgccgataatcttagcgaagcacaaatgcagcttatcgcccgcgagttaggccattcggaaactgcttttctgctgcacagcgacgacagcgatgtgcgcatccgctactttacgccaacggttgaagtgccgatttgcggtcacgcgacagtagctgcgcactatgtacgtgcgaaggtgttaggtttaggaaattgcacgatctggcaaacatcgctggcaggaaaacatcgcgtgactatcgaaaagcacaacgatgattatcgtatttcgctggaacaaggtacgccgggctttgaactgccgctggagggtgaagtacgcgcggcgattatcaacgcattgcatcttactgaagacgatattctgccgggtttgccgatccaggtcgcgacgaccgggcattctaaagtgatgatcccattgaagccggaagtggatatcgacgctctttcgcctgaccttaatgcgctgaccgctatcagtaaacagattggctgcaatggtttcttcccgttccagatccgtccaggcaaaaacgaaaccgatggtcgtatgttctcgcctgcgattggtattgtggaagatccggtgactggcaatgccaatggcccgatgggtgcatggttggtacatcacaacgtattgccccacgatggcaacgtgttgtgtgttaaaggccatcaggggcgcgcattggggcgtgacggcatgattgaagtgacggtgacaattcgtgataaccaaccggaaaaagtcaccatttcaggcacagcggtgattttgtttcatgccgaatgggcaattgaaatctgaaatcgttgcctgatgcgcttcgcctgtcaggtctacaaccgggctaatgtatgccggataaggcgtttacgccgcatccggcaacctgacataaattattttcccgcctccggatgcgtatcaaacgccgccatcaccagcgctaactcatccacagtaaagccatgtttcgcatcatccacgcccagaccaaactgttcctgcatcacggcatataacgacgccacatccggtagatttcgctgctccaccgcgtgcccattttcataatgggtaaaatgaaaattggtcagtgtcagcttgccgccgtccggcaaatggcggcacatcagcaaatgatggcgaaaatgcgactgcggccagtgcgccgaccagaaattgcccatcacataatcgctttgttgctgctcgcagagatcgaagcggtacatcggctgccaatgctgatgatgattaaactgcaacacccaatcatcaccctcctgcaacaaccgatactctccgtgtggcgtggtctgcacgagatcggaaactaaacgaatcggcgcggttagcgtctgcccaccgaaaccgacatcagcaatccatttttccccttccagttccaccaacagcaaacgatgggtgcgcggcggtaatgctggcggatttgataacactacgcgccctaacaagctgcgaacgttaaaccccagctcgcgtaacacccgctcaaacacgccattctgctcaaaacagtaaccgccacgacgggctatcaccagtttctcttccagcgattgatcatcaagctgtatttccctcggcagcaaaacgtcaaggttttcaaacggaatggtgcaattgtgtttcaggtgcaatgcacgaagcgtatcaatattgaccgcagcagctcccgaccagttaatacgggcaaaatagtgattcagaatgggcgtcatcaggcgtttcccttagtggttttctcaacttataacctggaatagacgccgcaccggctattttgtgcgatcgcggacatgcatcacgtttgcaaatcgccaatcccgttaatttcgttacttattgcgttacggactacgcttaaaaaaaccttcttcgcgaggcgataccatgagccgattcatccccatagaattacaccatgccagccgtctgttaaatcatggcccaactgtcttgatcaccagtttcgatgagcaatcccagcggcgtaacattatggctgcagcctggtcaatgccggtggagtttgaacctccacgcgtggcaattgtggtagataaatcgacatggaccagggagttgattgaacgtaacggtaagtttggcatcgttatcccgggcgttgcagcaactaactggacgtgggcggtgggaagtgtgtcggtgcgtgaagaagataaatttaattgctatggcattccggtggtgaaaggtccggtgcttggtttgccacttgttgaagagaaatgcctggcgtggatggagtgccgcctgctacctgcgacttctgcgcaacaaaaatacgacacgctgtttggcgaggtggtatcagcagcggcagacgcacgggtatttgtcgaaggccgctggcagtttgatgatgataagctcaatacgttgcatcatttaggtgctggcacgtttgttactagcggcaagcgtgttacggcaggttaagcattacatgctgtaaccgggtttctttatcaaagcctccatttggggctcgatttcggcatcccagatagcttgccaagattctggttgaatctgctgtagagcaatgcttatcgagctatctttactgttcagatggcgaataataacgtcggtaatatctgcagcaagtgctgctttttgttgttcgtccagttcacgcggaaagcatttaatgtcgatgtgcggcatgattacgctccttttgaaagatgtcagtaaaattaacacacattgtgaatgtcatgtgtccggtaaagcgtttatacgacaataatgcccagggcaagattacgaaagcccgctccccgtaaggactgacgccaggtagtttctgcccatggctgcttttcgcatcttacgtcttaaccctgccttgaataccttatcattcgtcaaaatattaatagcaatgtgccgtatccctgaaaataattctgctgcatttcctcttcttattttgcagtcgtcttcattcattaccacgtccagacgccaatgcagcttattctccacgtgccagtggtttcggattgctgtggcgaacttctctgcggttaaatcagcagaactgatataatatctgaccgtcatttctggctctttcttttgttctgctattatggaccgaaaggagactgccacgcataatttcttcagccctttccattcaaacgtgaaatcaataagttcatcagggacatcgcaaacaatatgaagacggatttcttctctgccgtgactcttttcactaattgcgtaactgtcattctctggattatttaattctttcagcggaaatttttcctcaaaggctttatttagccgcccctggtttccttttaccgcgaataaataatcacctccctgtttttgtatcttctctgcaatatctttctggcaacccatcgcatcagttgtgatgatttttcctttaatatccagcatgttaagaagttcaggaatggctgtaatctcattggatttctcatccgtcttaatctgcccgagaatcagactgtgcattgttgagaacgcactaatgacatgaattgctcccctgcggcactcttgtcataagagtgccggagcgtttttccatcaattgcaatgacgtctttatcatctgaagaatggcagtcacgcatccagttaataaagcactcgtgaaattttgcaggactgatacaggatacaactctggcgatggtatcgtgaacaggaataccattttcaaaatcaccatattgttttaaaaaatcgagatgtgtttccccaaaatcctctatatcttcccagccttctgcaccagaaataacggcacaaatagtcaacagtagaatatccgataatttatgttccactttccaggcttgtttttaatcggggataatagaaatatgttccatcaattttttaagttccattttgttctccttaattatgtaaggagtatttgatcatgtataagcaataaaaaacagcttcaggtaataaggaatatctcaatttttaaacataaaatgcgaattatttagtacaaaaagtgaactcctcagggcaagattacgaaagtccgctccccgcaaggactgacgcgagatagtttctgtccatggctgcttttcgcatcttacgtcttaaccctgccttgaataccttatcattcgtcaaaacattaatagcaatgtgccgtatccctgaaaataattctgctgcatttcctcttcttattttgcagtcgtcttcattcattaccacgtccagacgccagtgcagattattctccacgtgccagtgatttcgaatcgctgtcgcaaacttctcagcggttaaatcagcagaactgatataatatctgaccatcatttcgggctctttcttttgctctgctattattgagcgaaaggagactgccacgcataattttttcagccctttccattcaaacgtgaaatcaataagttcatcagggacatcgcaaacaatatgaagacggatttcttctctgccgtgactcttttcactcattgcggaactgtcatgcgctggattatttaattctgtcagcggaaattttttctcaaaggctttatttagccgcccctggtttccttttaccgcgaataaataatcacctccctgtttttgtatcttctctgcaatatctttctggcaacccatcgcatcagttgtgatgatttttcctttaatatccagcatgttaagaagttctgggatagctgtaatctcattagatttctcatccgtcttgatctgtccgatgaccagactgtgcattgttgagaacgcactaatgacatgaatcgctcccctgcggcgactcttgtcataagagtgccggagcgtttttccatcaattgcaatgacgtctttatcatctgtagaatggcagtcacgcatccagttaataaagcactcgtgaaattttgcaggactgatacaggatacaactctggcaatggtatcgtgaacaggaatgccattttcaaaatcaccatattgcttcaaaaaatcgagatgtgtttccccaaaatcctctatatcttcccaaccctctgcaccagaaataacggcacaaatagtcaacagtagaatatccgataatttatgttccactttccaggcttgtctgtaatcggggataatagaaatatgttccatcaattttttaagttccattttgttctccttaattatgtaagaagtatttgatcatgtataagcaataaaaaacagcttcaggtaataaggaatatctcaatttttaaacataaaatgcgaattatttagtacaaaaagtgaacttctgatgatctttccctggcctgccaccatctcttcacaagcttatgcttattacatgttacatgcaaaacgtcccgttttgcatctttgtgcctacggcacaccgtgatctttccctgatgagggatatattaactattgaacattagcgcgaattatttagtgcaaaaaatcagcatcacgtgatgcttttcctgctattaataacctcctctatttaactatatttttcattgatgcaattcgtagatttgaagaagttcaactgccacttttttatttttactatcgcaatttttataccatacccatgcttccgtattttttactatttttaaatcatccataataaaatccccaccaaaaacagtaaaatacaatgtttcctcattaaaaataaaactcactgccccccgttactttattcgtaccccttataggtaatgacttcaacttattgatagtgttttatgttcagataatgcccgatgactttgtcatgcagctccaccgattttgagaacgacagcgacttccgtcccagccgtgccaggtgctgcctcaaattcaggttatgccgctcaattcgctgcgtatatcgcttgctgattacgtgcagctttcccttcaggcgggattcatacagcggccagccatccgtcatccatatcaccacgtcaaagggtgacagcaggctcataagacgccccagcgtcgccatagtgcgttcaccgaatacgtgcgcaacaaccgtcttccggagactgtcatacgcgtaaaacagccagcgctggcgcgatttagccccgacatagccccactgttcgtccatttccgcgcagacgatgacgtcactgcccggctgtatgcgcgaggttaccgactgcggcctgagttttttaagtgacgtaaaatcgtgttgaggccaacgcccataatgcgtgcagttgcccggcatccaacgccattcatggccatatcaatgattttctggtgcgtaccgggttgagaagcggtgtaagtgaactgcagttgccatgttttacggcagtgagagcagagatagcgctgatgtccggcagtgcttttgccgttacgcaccaccccgtcagtagctgaacaggagggacagctgatagaaacagaagccactggagcacctcaaaaacaccatcatacactaaatcagtaagttggcagcatcaccccccttataatggggtgttagccagccagacccggcatgattactgcccccagtcgtccatgatccggggggtgatgtcaccgggtctggtggggcgctggtaaccgctaataggggtcaggtcaggcacttttgccgggaccgtctgtaacgtggatgccggtacctgctccccgtggttatctggttaacccatatacaagggagacagaatgaccgaatccagcgattacgaatccgtccaggtctttatcggcgttgatgtcggtaaagatacgcatcacgctgttgccattaatcgttcaggtaaacgcctgttcgataaagcattacccaacgacgaaaacaaactcaggtcgctaatatctgacctgaaacaacatggtcagatactgctggttgttgatcagccagctaccatcggtgcgttacctgtcgccgttgcccgctcagaaggagtccttgtcggatacctccctggactggccatgcgccgcatagccgacttacacgccggtgaagctaaaactgatgctcgtgacgctgccatcattgccgaagctgcccgtaccctgcctcacgtgcgtattccgctctattcgatcacggattggcatcgaagttcgatcagcgattcgcatccattcgatcaaccgggaacttaactttttctaccgctttttaactcgttttttcgctgctttccactgtcgggggatttttcctcagggactctccctgaaggaccactctgtgtgagttatgtaccagtctgtccaggatggcatctgctgttgttgggttctccatcagaccatgccatttatctaccgggaactggcttaccactatcgtgctgctttgtccgtaacgatcctctgtgatctccagaaggtcattacactgggcgttacttaactgttccagccccagatcgtccaggattagaacctgtattttttgcaactgtttcagatatttcagccaactgccatcaacacgtccctgagccaactgttccagtaatcgcccggttctacagtaccggacgctgtatttctgtcgacatgcctgttcgcccagcgcattggctatccagctcttaccgcatcctgtcggaccggttatcagtaggtttttcctgtggattatgtagtggccgttcagcagttccctcatctgttcagcccgcagacctcttgaggccggataacgcagcccttccggtgttgcctgatatttcaggcaggcattttttctcaaccgtgccacacgactgttttctctgctcagaagctcgtcatcaaccagcagtgtcagcctttcctcgaacgacagttcgtcgtaagtctgaggcgtttcccgttgccgtatcaggctcccggccatcgccgggagtttcagttgggtcagtttgtttaacagattatcactcatacggttgttccttctgtcagtggtagtagccaggaccacgcaggttttcatgctctgaagcatatgccggatgttgttcgccctggcgggataacggaagctcaacgttatcccgatgatgacgcagcagattgtcgataaagcgtctgtccggggcgttatagtgcagggcaacgtaacaggccttttccagccgttccgggccgtattttttctgaagtgccagcagacccaggactgcacggtaagccagctccggatggggtttggctttcagcatggattcaaccacccggcctgtggacggacctgtacggtttccctgctcgataaggcgttccggtgtccatgtcccatgccgccggtggcgttctggcatgtgaagcggattggttgtgtgtttatattcatgtgtgctgcgcggatgttgcgccacacactgccccttgtgccagagctgtaccaccgactgccccaccttcagtgacagacgctgaccgaccagttcgtgtggaacggagtaccagtgacgggcatattcaacgtggtagtcagggccaaccttcacggctttgtattccgtgtattcataaggctccagaggcagcggagagagtgctggtgcatccagcatgcggaagcgttctgcgcgggtttgattaccgtatcccttcattggtcggttattcatgtccgtcagcaactcccgaaggcgtgcattcagcgccctgagcgtgtggaaggtttcattacggatgcgggcaagaagccatcgctcgacgatgaggacgccgttttctgcttttggtttatctttaggtttgcgcgggcgggccgggataataaccgtgccatagtgctcagccagcgcctgataactgtcgttgatgacaggctcatagcgatcggcttttttcactgcgcttctgaggttatcggggatgagcagcttcggtacgccgcccaggaaggtcaggcaacggctgtgggcatttaaccatgacatcatgtcctgaccttcgcacgcttcaacataggtatagttggacgcccccattacagccacgaagattgccacgcggcgtatctctccggtgtccggattaataacagggaccgtaggaccacagaagtcgataaagagcttttcgccagcacgatgctcctgtcgcatggagaggcgtcgcgtttttttccacttccggtagcaacggcagaagtgtgagtatcccatcgctttgtcacccgcctgtgccttgtattccatccacaacagttggcgcgtcacgccaggttttctcatttccgtatcgaagtacagcatgtcaggcataacaagctctgacgcagaggtgtctttgggcgggaaaatgagtttctccagcgtgtcatgagatatatccgcaggtaatggccatgacagagaagaggctttgaagcgggcaagaacctcaaaaacggttgaggcgctgatgtgtaacgtcagtccgatacaacggttagtcagcttcttatcgaacttgagctgaaggatcttaaaacaagtttccatagtgctcctggattttctctttttggacattgacgtctccactggtttaaacacggcaatggagactgtggtgaaaagagttaattcccggagtgactggcgaattccaatcaatgatcggaagtatgccaaatcgtgatcgattgtgatgccaaactgtgatcggagatggatgccaaatcatgatcgattcgaatgccaaactgcgatcgattcagatgccattttgcacctcacgcgctacgcacgctgaaactggctgacgagcaaatcgccgaactctccatgctctgcggcttcgatgatgatcttgccgcacagacaacgcaggccagcaaccgtatccgcggccttctgacccagatacatccggcactggagcgcgttctcggtccgagacttgagcacccggcggtactcgatcttctccagcgatatccctcaccagaaaaactcgcttcgctgggcttcgctgggtgagaagaagctggcagcccagctctgcaaacttgcgcctcgtctgggtaaacgccttgcagcagacatagctcaggcactggccgaacaaaccgtcgtcgttcccggcacgaatgccgctgccgtagtactgccacgtctggcactccagctcatcacgctgcgtaagcaaagagacgaggtggcgcttgaggtagaacagcgagttcttgctcaccctctttacccggtcctgaccagtatgcccggagtcggtgtcaggaccgcagccagactcctcaccgaggtcgcctgccgcgccttcgcctctgccgcacatctcgctgcttatgctggccttgcgccggtaactcggcgatccggctcgtcaatacgcggtgagcatccctcgcgacggggtaataaagctctcaaacgggcgttgttcctgtcggccttcgccgcgctcagggatccgctctccagggcttactacacccgcaaaatgggtaatgactccaacttattgatagtgttttatgttcagataatgcccgatgactttgtcatgcagctccaccgattttgagaacgacagcgacttccgtcccagccgtgccaggtgctgcctcagattcaggttatgccgctcaattcgctgcgtatatcgcttgctgattacgtgcagctttcccttcaggcgggattcatacagcggccagccatccgtcatccatatcaccacgtcaaagggtgacagcaggctcataagacgccccagcgtcgccatagtgcgttcaccgaatacgtgcgcaacaaccgtcttccggagactgtcatacgcgtaaaacagccagcgctggcgcgatttagccccgacatagccccactgttcgtccatttccgcgcagacgatgacgtcactgcccggctgtatgcgcgaggttaccgactgcggcctgagttttttaagtgacgtaaaatcgtgttgaggccaacgcccataatgcgtgctgttgcccggcatccaacgccattcatggccatatcaatgattttctggtgcgtaccgggttgagaagcggtgtaagtgaactgcagttgccatgttttacggcagtgagagcagagatagcgctgatgtccggcagtgcttttgccgttacgcaccaccccgtcagtagctgaacaggagggacagctgatagaaacagaagccactggagcacctcaaaaacaccatcatacactaaatcagtaagttggcagcatcaccgcaaaatgagtcagggaaaacgacacaatcaggcgcttatcgccctggcgagacgacgctgcgacgttctgttcgccatgatgcgcgacgggactttttataccccgcaggggtcataacatgcttgacaacttaataggggcaccctcttttattttaatttccgcttcatttgtgttcaaatcaacttttttaattactccatgtaagttgggttttgatagtttttctacgccaccatcaggagcgggtaatatacatcgtttaagaactttagcatttgcacatccaataaccaaaattagaatgcacactcccatgttaatcgcattaacgtgtcttaaaacgttcatatctaattctctctccaggatgcgaatacatccaacttgtcactttcttacacaactcatctacatcttcattctgtgcacgggtacatcccatagttggtttccagccttgtcgaggagcataaggatcgcgcaacgatgatcccccaccatgtagccatcttgctctagtatctgtagtatagatcttcgttgtgccatatgctgccgatattcctgatccatttgtctcacaaccaacgacttcacctgtatatggatcaccagcaccacgttgagaacgacgatcaattctattgctactatcaaaagtcattgaatcacctgtttcaggatcataataaatagtcactcctccagtcatatcagtaagaacaagaggagtttcagcacctgcccggtctggagcgggaggcccatatacacttataactcgttctaaccccagtggatcagtgtaacgtattggtgccagtggatacgtgtatagatttattccccccttcaaccctatcggatcctgggtgatataccgcccctgcaacggatcgtagtaccggtgacggttgtaatacagtcccgactcctcatcatactgctgccccggcaaacggtacggctggtacaggtgatgcgggttctcctcattaagctggttcccccactcgtcatactccccgcgccacgccgtttccccttccgggctgatgagcgcctgcggcagtccccggtggtcacagtggtaaagatgcagcctccgctccgggatgtattccgcctccatctggctttccatctgctccaccgtcagcccgcactgcgcaagccatgcctcactctccgcactcaccgcacccgcacgcagttcccgctccagcctccccagcatcaccgccagctccgccggaagcgtcacccccgtgtcctcctgcaacacctccgccaggctccggtgccgcgccttcgcctgttcgccattctctgtttcgattctcaggagcggcgtgaagcttcccggctggtataccgtctggattcttgtctgttgggtctgtacagtggtcagcctgtcaccgtcccacccgtaccaggtctcctccggtttacgcgacagcgacatccaccccgtcaggtcacgctcccgccgccatacccgttttcccgtccggcggcccagcgggtcatagaggtaccggctctccacctgtggttcgccgtgctgtatccgcgtgtagaacaccaggcggtgctggctgtcgtagtgatagtggtgggtgcgctcgtcgtgcatccggataaccccttccgggatacggtccgtcttctccgccagcctgccgtattcatcgtagcgatagacatagtgcgcatcttccgcgatgcggttatccggccacgccgtgagggtgctgtccgggtgcagttccgggtccggcagccggtttcctgccgggtctgttgcatacgggatatcgatatccaggttcgctgccgtggtgtggacgcccgtcagcctccccgtgtcgctgtaacggtactcccggctctcctgcgggccactgatgcggattagctgtccgttgtcgttccagtcgtagtcacggtcaagctgcggaaggttcaggtgcctgctccggagctggccgctggtattccaggcggtggcaagttcatatgcctccccgccgaagctgcgggccgtctcacggtgcagccggtcccgcgtgtactcgaccagcggtgttccgcccagcttcatccccgcaagataaccgctgccatacgtcagccactccaccggcggcaggccgtccggctcctgacgggtcgccagcccctgttcgctgtacgcgtgccccgtctcatgctcccacagcatctcccccgtctccggggtctccaccgtctgccgttcgcccgtcagacggcctttatcgtcatagccgtagtggaccgccacacggtggccttcactcaggtggctgatttctgtcagccagccgtgatcgtcatactgccactgctccgccggttcaccgttcaccgtgcgccgggtgatacggtccgacgcatcgtaatgccagagggtgataagcccctcatcttcactctgcgtgagttttccggtcaggtcatactggtaacgttgcgtccggccgtcaaagccgcgctgctccgtcagcctgtcgaccgggtcataccggaacgtggactggctgccgttctcgttggtcagcacagtgatgcgcccggcggcgtcataccccatgcttcgcgtcagaccgccctgcgtggtgctgacggcctttccccacgcatcatactgtatctcactgcggctgccgtccggggcaacgatagcggtgaggtctcctgcggcgctgtactcataacgggtttcacgcccctgcgcatccctctgactgaccagttgaccgcgcgggttataactgctgtaagtgctgatgccttcttcccggtgaacggcgatttgttgaccgtaccggtcatactcataccgcgtcgtgtaccccgagcagtccgtaaacgcctgaagctgaccgtaccggtttcgcgttattctccgcctcaccccggttccgtcttccaccgcacagggcaggccactgcgggaagaatcataaaaccagcgcgtaatgttaccgttgcgcgaggtctcttccgccagccttcccttctcatcatactcccggctgctgcgaagcccgtccgggtacgtcaccgacgtcacctgccgctggctgttatagccataccgtaccgtcctgccgtccggcagtatcactgaagtcagctttccagacgccatatgcagtcggtactccgtccgccgtcccgccgcatccgtctgcgccttcagcctccccgcctcatcatactcgctgcgggtgatgctcccgtcggcatgctccttcttcaccacccgcttcaggccaccctcgccttccgtgtacagcacctcccgccggttcaggctgtccgtgatgattacccggctctctccgtactcaaagcggtagtccagcccctccgggttgacctgctccgtcacccgaccggtatcatcataccggtagcagctctccggcctccccgcataatggtgcgccaccatccgcccggcgtgctccgcatcataagtaaacccgcgcacctgcatcccgctgcggtcatacaccgcccgcagttcaccaccggccgtgtacgtgtagcgcgccagcggcgcagtcggctgttcatccgggtatgccgggtcgtgtgtcagccataccgcctccagccggataccgttatcggcaccgtactctgtaccggcgggcagcgtgtcggggaaggaaggagctgagagagggcagggactgtcaggggaagataacgaagcggtgtgcggtttacgggcctcttccgcccgctgcgcctgtgtggtcagcaccaggtgaaaacggcggcccgcgccgtccatcacccccgtcaccgcgcccgccacgtcaccctccgctgcccggtgaaaggccagcgtccgcccgaagccgtccaccacgcccgtcagcacccggtatgcgggcggctccggcggcagcacctcgtccgcccccggcacccgctccggccagctgagtatccaccacggcccctgaaggctgtttgtcgccaggtacacatgcggactcaggcgaacatcttccggcagcacctgccagagcgcgcttagcggctgcgaactgtgctgcgccgctactccgccccgcgccagccagagtgactcgctgcggctgtagcttatctcgccgggaaacagcggctcaaagtgaatgctcctgccgccgctgtcgttgagtatcaggccttcatcgcgtatctgtaagcggatatcgaagggcgctttccagccgggaccaaacacccccaccggcgcgggtgttctggtccggtagctgctgtaggcgcggaaaagaataaacggcagcgggcagggcagcgcaaggtccgtctcgcccggcagcaccttcgcacccagcaccgggttcaccgggttagcataggtaatccctcccggacacaccgaacaggccactcccgtcggcgcacctatcagcacacccgctgaaccctgcacaatatccagtcccttgcgggtcatgtcgccctgccgcgccgccggttttccgctcatggtttattcctcttcatctgaattgatttacattaggttggttattttctcatacccacaactatattttctctctgaatttattacgtgcaagacaatcgcagcactctaactaacttcgatgcaatttgatgttcagaaaaatccctcattagattattatcatgaaatacagctaatcatctttagcttatatatttctcaatgtattcttttgaaaggatccgtgccctttcaaactcttcagcagggcaagattacgaaagcccgctccccgcaaggactgacgccagatagtttctgtccatggctgcttttcgcatcttacgtcttaaccctgccttgaataccttatcattcgtcaaaatattaatagtaatgtgccgtatccctgaaaataattctgctgcatttcctcttcttattttgcagtcgtcttcattcattaccacgtccagacgccagtgcagcttattctccacgtgccagtggtttcggattgctgtggcgaacttttctgcagttaaatcagcagaactgatataatatctgaccgtcatttctggctctttcttttgttctgctattattgaccgaaaggagactgccacgcataatttcttcagtcctttccattcaaacgtgaaatcaataagttcatcagggacatcgcaaacaatatgaagacggatttcttctctgccgtgactcttttcactgattgcgtaactgtcatgctctggattatttaattctttcagcggaaatttttcctcaaaggctttatttagccgcccctggtttccttttacagcgaataaataatcacctccctgtttttgtatcttctctgcaatatctttctggcaacccatcgcatcagttgtgatgatttttcctttaatatccagcatgttaagaagttcaggaatggctgtaatctcattggatttctcatccgtcttgatctgcccgaggaccagactgtacattgttgagaacgcactaatgacatgaatcgctcccctgcgacgactcttatcataagagtgccggagcgtttttccatcaattgcaatgacgtctttatcatctgaagaatggcagtcacgcatccagttaataaagcactcatgaaattttgcaggactgatacaggatacaactctggcaatggtatcgtgaacaggaatgccattttcaaaatcaccatattgcttcaaaaaatgttccatcaattttttaatttccattttgttctccttaattatgtaaggagtatttgattatgtataagcaataaaaaaacagcttcaggtaatgaggaatatctcaatttttaaacataaaatgcgaattatttagtacaaaaagtgaacttctgatgatctttccctgagtcatatacttgccctttagcggatcgtagtaccggttacggttatagtacaaccccgcctcttcatcatactactgtcccgagagattgtcagacgcttgctatactccaatcctgtctgtttttttatctactccggcgtcaggtcgaaatatgccagccactgtaatttatatttatccatatcacaccactatcctatcccccaaaataaatcacacattactttaatccatttgtttaccttatcttttacctttccacttttaaaaaataaagaatacacaaaatgcacggttacaagtatactactaacaataaacacaaacataaaaatatcattaaaaatacacattacaaccccagcgtcccaagctcttcaaaaaacttcattggagaatctttgatattctcaatcttttcaccataaacgtctaatattgatggttcaccagggtcatcaaactgctcaccataaggtaaaatacccaataaatttctccaacacctatctctaccattttcctgaagtgattctgataattgtaaatttgctctgttatatgcagctgtcgcagattttatattccacgcccctaaagccatagaagctgcaccgactggggcagcaatgatcgttccatcggcagcaacacttataccgaattttgtcatgccacttgcatacagccttgctgaattagcagtatttaaactagctgtaaacatttttgtcgggttaaacggaaggttatccagtttattatttatatcatctataaaatgactacaactctcacatgagaataaccccaacggatctatcctgctcaccggattcagcggatactgatacagattccacccacctttcagcccaatggggtcctgggtgatgtaccgtctctgcaacggatcatagtaccggtgacgattgtagtacagccccgactcctcatcatactgctgccccggcagacggtatggctgatacacatgatgcgggttctcctcatttagctggttgccccactcatcatacgccccgctccacaccgtatcgccgtcttcgctgatgagcgccagcggctggccccgatggtcgcagtggtaaagatgaacgtttcgcactggtgtgtattccggctccacctgtctggccagttgctccaccgtcagcccgcactgcgcaagccacacccggctttcactgctcacgcggtctgcccggatttcttcctccagtctgtccagcagccgcaccagttcagccggaaataccacgccgtgcccgtcctcgctcccttcctgctgcagcttctccgccaggctgcggcgctgcgctttctcccgctcgccgttctctgtctcgacccggatgagcggcgtgaagcttcccggctcgtataccgtctggatacgtgtggtgtcggtctgtaccgtcgtcagcctgtcgccgtcccagccgtaccatgtctcctccggtttacgcgacagcgacatccaccccgtcaggtcacgctcccgccgccatacccgtttcgccattcgccgtcccagcgggtcgtagaggtagcggctctcgaccagtggctcgccatgctgtatccgcgtgtggaacaccaggcggtgctggctgtcgtagtggtgggtccgctcgtcgtccgtccgtatcacacccgtcgggatgcggtccgtcttctccgtcagtctgccgtattcatcatagtggtaaacatagtgcgcatcctctgcgatgcggttatccggccacgccgtgagcgtgctgtccgggtgtagctccgggtccggcaggcggtttcccgccgggtcggtggcatacgggatgcggatgtccaggtccggtgcgagggtgcgcaccgtctcacggtgcagcctgtcccgcgtatactcgaccagcggcgtcccgcccagcttcatgcccgccaggtaaccgctgccgtaggtcagccactccaccggcggcaggctgtccggcgtgacgcggtttgccagcccctgttcgttgtaggcgtgtttcgtctcatgctgccacagcagttcccccgtctccgggttctccaccgtctgccgttcgcccgtcaggcggcccttatcgtcgtagccgtagtggacagcgacacggtggccttcgctcaggtggctgatttctctcagccagccgtggccgtcatactgccactgctctgccgggtcgccgttcaccgtccggtgcgtgatgcggtccgacgcatcgtagtgccagagggtgacaagcccctcatcctcactctgcgtgagttttccggtcaggtcataatgataacgttgcgtccgcccgtcaaagccgccctgctgtaccagccggtccagcgcatcgtagctgaagtcgctgtgactgccgttctcgttagtcagactgatgacacgtccggcagcatcgtactccatactgcgcgtcagcccgccctgcgtggtgctgaccgcctttccccacgcatcgtactgtgtctcgctccggttgccgtccggggtgataacggcagtcaggtcgcctgcggcgttgtactcatactgcgtttcacggccctgtgcgtctttcaccgaggttaaccggccacggttgtcatagtggcggtaaaggctgataccttcctcgcggtgaaccgccgtcatctggccgaagcggtcgtattcatagcgggtctggtagcccgagcagtcagtgaacgccagcaactgcccgtagcggctccacgtcatctgccgggtgctgcccgtcgcatccgttgtcgtcgccggtaactcactgtgcgcgtcatcgtagcggtagcgtactgtctccccgctgcgcgatgtctccgataccagcctgcccggttcatcatattcccggcggctctccagcccgtccgggtacaccaccgccgtcagctggttcccgtcgttatagtaaaatttcgtctcccgcccgtccggtgtggtgatgtccgtgatatcgccggacaccacattcagaccgtactctgtccgccgtcccgccgcgtccgtctgcgccgtgagccttcctgccgcgtcatacccgctgcgcgtgacgctgccgtccgccagttcttttttcaccacccgtttcagcccggccccgccttctgtatgcagcacctcacgccggttcaggctgtcggtgacggtgatgcggtcctgctcataaagatagcggtagcttaaccctgccgggttcagttgctccaccacccgccccgtatcgtcgtagcggtagcgcatctccggccttcccgcgtaacggtgcgccaccatccggcccgggtgctgcgcgtcatacgtgaaagcgcgcacctgcgtattgctgcggtcatataccgccagcagttcaccggcttccgtatacgtgtaccgcaccagtggcgcagcgggcaggctctccgggtatgccgggtcgtgcatcaaccacaccgccgaaaggcggatacccctgtcggggccgtattcggtaccaggcagtgtgtcggggaacgctgaggctgagagagggcgggaactgtcagaagaagatagcgaagaggtgcgggcctcttccgcacgctgcgcctgcgtggtcagcaccagacggaactcccgcccggcaccgtccgtcacgtcggtgatttccccggccaggtcaccggcggcctcacgccggtacgtcagcgtccgccatcccggtaagcacccggtacggcggcagcggcgctggcagtacgtcctcagcacccggcacccgctcagccccccccagtatccaccacggcccctgtgcgctgttggtcgccaggtaaagatgcgggcttaaccggatatccggcgcagcgccccccacagccgcgccagcgtatggccgtccggctgtgctgccttaccaccgcgcaccagccacattgactcactgcggctgtacaccgcctcccccggcagcagcggctcaaagtgaatgctccgcccgccgttgtcgttgagtatcagtccgtcatcacgtagctgtaagcggatatcagaaggcgctttccagccggggccgaaaacgcccaccggtgcaggcgtcttcgtccggtagctgctgtaggtgcgggagagaatgaacggcagcgggccgggcagcgcaaggtccgtctcgccgggcagcaccttcgcccccagcagcggatttaccgggttgcccgaagtcatcccgcccggacacaccgagcacgccacgccggtgggcgcgccaattcttacacctgccgaaccctggacaatgggaccgccatactgagtcatatctccctgacgcgccgctggttttccgctcatgattcaaattccttcttctgtttatttttaatgctggtttgttactgaataccgaacaggtacgggatcagtactctctcatatccggcgtatcctgcttttcatcaggggtcttcggtggggatttcgaggctgcacagttccagttaatcaacagtgagtcaccattaacctgctccttaccctgcaaatgaatttttgtgccgttgagaaaaatttgtccgtccttcgtcagcaccagccttgccttaccacagcagagctccagatgctcaccggcggagtaaatcgcggtctgcccggtatcatcctttttcgttttaccaacggtgaaggtaacgttatttccgactttgacgtcataacccagcccgaccctcaacgatttatgcaaaccgatctgcgaggactgcatcagtgccaccgaggtgttcataatgccacctaccgtcgtctgatacgccacgcccaccgtcagcgcacgaacaagtccaatcgtttccacctgaacagaacccactttaattatctggttactgcccaccgtctctatctggttaacgcccaccgtctctatctgattgttggtaaccgcaatcatctgattgttgccaatggtttcagcatggttgtttatcacatccgtggtgcggttattcagcacctcggtgttcatgttcttctgcgcgtggatgtagacctgttctttccctgtcgcatcgtcaaacttcagttcattaaacccgctgcccttataggttttcgaacgaatggtcatctgcgtcttcgtccccggcaggctgccgggtgtgcggttttcctggtggtaggtacgccccataataatcggctggtccgggtcgccgttgaggaagtccacaatcacctcctgacccacacgcggtatcgccaggttgccaaagccggtgcctgcccacgcctgtgccacacggatccagcatgaactgtcctggtttgacgggttatagcggtcccagttaaatttcacccgcacgcggccatgttcatcacagaagatttcctcgcctgccggtcccgtcacgacggcgctctgcgggccatccaccagcggtttcatcaacggctgtggccgccatgttctgtctgccgggattaccgcaaaatggttctccagcgtggtgcctgaacccctgcgtcccggtaccgcctgcggctgttcgccgtgaagatcgctcgccaccacctgccattcccggttcaggttcgcctgcggatgccccgtcagcacaattcgccgtcccggccatatctccggcgaacggcttgttccgcgcgccacttctgcgttgtttcgccagccgtccatctgccagcgggcaaagttctgcccgtgggcacccttgaaacgtccggggtagtcatacacttcatactgcgtgcgctggtaatcctggtactggccttcctgatcaaaacgccctggccagccgggacgtttaaaggtgtagtctttggtcactacggaagaaggacggatttgtgcgctgtagcgaaactggctgatgcagagggtacttacctcggtacgggtgttcgggttccaggggatctcaaaggactccggcagataacgcacggtgtcgcacaggaccaggctctggtcggtacttttttgcgcgtgctcctcataaaagaagatgccttcctccgccgccatccggcacaggaaatcgtaatcagtttcgccgtactggacacaaaactcacgggaaggatgcggctcgctgaacagcggactccactcggtcacaccgttttccttcaggatcgtcgcgaggatgctttcgatgtcctcattctggaagatacggaagttctggcgcagccctatgcgccacagcggtgggcataccttcatgctgtacagcatctggtttttgtcgttctcccccagttcaaaccaggtcaccacacctttcacccggcgctgtacgtcatcgccctgccataccgtcaggtaggccattttgtccagcacctgcgcaaattcaagggagagaaactgctggctgaccagagagagatcgagggaaaagagcgaagagagtgactggttcaaatgaaaggaaaccaccgcaaaagcatccggtggcaggccgtccacttccagtgtgaaacgtaatccggttgacatagcaacctccgtgaaaatgaataataatccgcacatattgcatgtacaacatgtcgggcggatgagataagcgagtcgacatctggcgttaccggggaatatcagaaaaatgtcatggttatgtgatgatttagtctgggattttacttcagagaaacgggtgtctgtttagtcaacaaaataatcacaaacgcaacggatgggttctcgacgttattcacgacaggctcgtacattacagcgagtaataaaaaacctgatatgcaaagtcaaaccaatattcataatgtctttttattcacaacaataaataattcaataacaatcattgaaatgaatgatggtttgtataaggaatatacgctaccgcccaccctgataacatgatctgcacattgccatcttaacgtcgttaaacactggcttaatagtggatatttcaaattaggaatttattaaattcacctgatgaatataataagcaaatagcatagaaaataatggcaactccccccgagaggaccatttccaaagcactgcaccaccacctggtgcccggatgatcttgcttcagtggtaagagtacctgattcattgttcccaaaatgatgttttccccggccccgccaataatgtgcagctctcacgtgataatctattgattaggttatattaagaatcaatatttaaaatacatccattttcttgaataaatcaacatatttatttatcaattgctgttttagctctgactcatcaagctctccatatttgtcctatagataattgcgaataaatacagagaacgccatttatccttttagcatacctgccggatatttttatttgcattaatattaattgcatctccaactccgagcatatccatcattaaaaactttttgagattatagaatacctgtgataacaagtgaaacatctgcacaatgtgaatagttagtttcttttcagaggaaatgaaatagacaagctgactgaaggggagagtgatataaatcaaaaaacataacatgaatttaattaattacgcccatcattgtggataaagttactgaataataaataacataatcctctggtatcccactcaaataatttcattcctttttaatacttcttgtaatttcggtaactgacatacagcatcagcaatcgcactgatattcgtggcattatcctgaaaccattcatgcccagccccccatgtgcgcatagtgcaaagataacagtccaccagcgttagttgctcaccaaacgcataaggttcagcggtcaattgtgaattcagccagatataaagcgatttacgatattcaataacattcttctttaactgttcaggtgcgtcaggagcccaacgctcagggtaatcggcgaaagtgaatgttggatagacattagcaaccagccagaccaatagccgttgaaactgctgacgttcggcgcgcccaaccggtggcgcaaggtccgggcgacgatcgagaaccatcaatgcaatcgccgctgtctccgtcataatctcgtcattttccagcgccagtgtcggaatctgacacaacgggttcagggttttcaataactcgcgtgaagttccctcgtggtcaaaaccactgacatcaacgaactgataaggaatatcagccagtgttagcatcagctcactgattgtagagccccatccgggtacgccatacaccttaatcatatgcccctcacaatcttttaaagattaagtgtaggacagtacacaggttaaccagcaaaagtatttgtcattttttcgtcagttgtatgaatccccttcaggattgtaaggggatgttttgcatcgtatatcgataacgggtaggatgctgcgccgatagttttatacccataaagaataatggtgataactatcatcgccaggatgaataaacattgttcatggcaacttatatgactttttcattaaagcaatcagggagagcaatgagtaaacacgacaccgacacttcagatcaacacgccgcgaaacgccgctggcttaatgcccacgaagaggggtatcacaaagcgatgggcaatcgccaggtacagatgatcgccattggcggcgcgattggcaccggcttgtttttaggtgcaggagcccgactgcaaatggcgggtccagcactggcactggtttatttaatttgtggcttgttttcgttttttattctgcgtgcattgggtgagctggtgctacaccgcccttccagtggcagttttgtctcttatgcccgtgagtttttgggtgagaaagccgcttatgttgctggctggatgtacttcatcaactgggcgatgacggggattgttgatattaccgccgtcgctctgtatatgcattactggggtgcgtttggcggcgtgccgcagtgggtctttgcgctcgctgcacttaccatcgttggcaccatgaatatgatcggtgtgaaatggtttgcggagatggagttctggtttgcgcttattaaagtgctcgccattgtgacctttttggtcgtgggtacagtgttcctcggtagtggtcagccgctggatggcaacaccactggctttcatttaatcaccgataatggcggcttcttcccccacggtttgctgcctgcgctggtgttgattcagggcgtagtgtttgcttttgcctccattgaaatggtgggtacagctgccggagaatgtaaagatccgcagaccatggtgcctaaagccattaacagtgtgatttggcgtattggcctgttttacgtcggctccgtggtgttgctggttatgttattgccgtggagcgcgtatcaggcggggcaaagtccgttcgtgacgtttttctctaaactgggtatgccatatatcggcagcattatgaacattgtggtgctgaccgctgccctctccagcctgaactcaggtctgtactgcaccgggcgtattctgcgctcgatggcgatgggcggttccgcaccgagttttatggcgaaaatgagtcgtcagcatgtgccgtatgccgggattctggcgacactggttgtgtatgtcgtcggcgtattcctcaactatctggtgccgtcgcgcgtatttgagattgtgttgaacttcgcgtcgctgggaatcatcgcttcatgggcgtttatcatcgtgtgccagatgcgcctgcgtaaagcgattaaagaaggcaaagcagcggatgtcagttttaaactgcctggcgcgcccttcacttcctggctgacattactgtttttactgagtgtccttgtgctgatggcgttcgattacccgaacgggacttatactatcgcggcgctgccgattatcggtattctgctggttataggctggtttggtgtgcgcaaacgcgttgctgaaattcacagcactgcgccagtcgtcgaggaagatgaagaaaaacaggaaattgtgtttaagcctgaaacggcgagctaattgcaaaattgcccggctacgtgccgggcaaatttagattactgacgaaggtgtgccgcatgcggcgtgataaaagtcaggcaagtctctccgttttcaccctcgccatatctattacagcgcaatacgaatcacatcgtctggctgggtagcttcctgctgtttagtggatttttgtttcacactgacatacagcgttttgccatcggcagacagcgccaggctgtttggatgagtcggcgtatcgaacgttttcactactttatagcttttcgcgtcaatcacactgactttacctgcctgacgatgcgttacgtaggcttcattacgcgctgggttaaacagcacagccagtgattccggtgctgcaaccttcgccagaatattgccattacgggtatcgaccactaacacttctgcggctttagaatcggtgataaatgcacgctgcctggcggtatcaaggctaatgttgataaagaagtgctctttgccgtcatccagcagctttttacggctgaggattttattgtcggcggtgtcgatggtaatcaattcgccgtcagcgttagtggtgtaaagacgtttgcctttgctatcaagcgccagaccggtactcattttaccggtgttctggatggcggttttcagtttgatattctcgccatcaacgacccaaatcacgctctctttaccaataccactgatgtaaacggtgttcgtggcatcgtcagctaccagctcacgcggttgcagcgggcgcacctcttccgtacgcttacgatcatccagcaccagacggcctttcacctcgcccgttttggcatctatcgccgtgaccgcgctgtttacagtgttaccaaaccacagtgtctgagtcgtgttattgatggtgacaccaaacggcttgagatcgttatggatcgcctgcgtcacttccagagtgaccggatcaagacgataaaccacgccgcctttatccagtttgcggctttgcgaagtggcgagccacagcgcgttttcttgctggctataagccatttcgtaggcacctttacctaccgctttacgcagcatttcttctgcggcctgcgtactgaatgatgaagcaacaagcaatgaacctaacagtaatgaaccacgcaggcgcgatgaaaacagatgacgtaaatgcatgacgactccctttgatgaaccgatatttttgctgcttcacaatgcttcgctaagcgtaatcatcgttacgctcttgttataaatgggaatggtaatcattattttctcaaatgtggagcatttcttgccgttacgactacaattttctcaattacttaacgtatcgtgccgtttcgttttccatgaatttacaattttattaccataacggcgttttcccattcttaacctggcttttttcatgaagattttttccgtccgacagaccgttttgcccgcactacttgccctttcccccgttgtttttgccgctgatgaacagaccatgattgtcagtgccgcaccgcaggtggtttcagaactggatatcccagcagcagtaagcgtggtggatggcgaggagatgcgcctggcaacaccgcgcattaacttgtccgaatcactgaccgacgtgcctggtttgcaggtacaaaaccggcagaactatgcgcaagatttacagctgtcgattcgcggatttggctcccgctccacttacggtattcgcggtattcgcctgtatgtggacggtattcccgccaccatgcccgacgggcaagggcaaacatccaacatcgatttaagcagtgtgcaaaatgtggaagtgctgcgtggccccttctctgccctgtatggcaacgcgtctggtggggtaatgaatgtcaccacccagaccggacaacagccaccaaccattgaagccagtagttactacggcagttttggcagctggcgctatgggctgaaagcaacgggcgcaacgggagacggcacacagcctggcgatgtcgattacaccgtctcaaccacgcgttttacgacccacggctatcgtgaccatagtggcgcacagaaaaatttagccaatgccaaactgggcgtacgcattgatgaagccagcaaattaagtctgattttcaatagtgtggatatcaaagcagatgacccgggtgggctaaccaaagcagaatggaaggctaatccacaacaagcgcctcgtgcagaacagtacgacacgcgaaaaaccatcaagcaaactcaggctgggttgcgctatgagcgtagcctgagcgcgcaagatgatatgagtgtgatgatgtatgccggagagcgagaaacgacccagtaccagtcaatacccatggcaccacaacttaacccgtcacatgcgggcggcgtgattaccctgcaacgccattaccaggggatagacagccgctggacacaccgtggtgaactgggcgttccggtcacgttcactaccggcctgaactacgaaaacatgagtgaaaaccgcaagggctacaataacttccgcctgaatagcggcatgccggagtacgggcaaaaaggtgagttgcgtcgcgacgaacgcaatctgatgtggaacatcgatccctatttacagacgcagtggcagctgagcgaaaaactgtcgctggatgctggcgtgcgctacagctccgtgtggtttgattccaacgaccattacgttactccgggtaacggcgatgacagcggtgatgccagttatcataaatggctacctgccggttcgttaaaatatgcaatgaccgatgcctggaatatctatctggcagccgggcgaggttttgaaacgccgacgattaatgagctgtcttatcgtgctgatgggcaaagcggtatgaactttggtttaaaaccatccaccaacgatacaattgagatcggcagtaaaacgcgtattggtgatgggctgcttagtctcgcattgtttcagaccgacactgatgatgaaattgttgtcgatagcagtagcggtgggcgtacgacttacaaaaatgccggaaagacccgtcgtcaaggcgctgaactggcatgggatcaacgtttcgcaggagattttcgcgtaaacgcgtcctggacctggcttgatgcgacctatcgcagcaatgtttgcaatgaacaggattgtaacggtaatcggatgccagggatcgcccgtaatatgggctttgcgtcgataggttatgtaccggaagatggttggtatgcaggcacggaagcgcgttatatgggcgatattatggcagatgatgaaaatacggcaaaagcgccgtcttatactctcgtcggcttattcaccgggtataaatacaattaccacaatttaactgtggatttatttggtcgtgtcgataatttattcgataaagaatacgttggttctgtcattgtcaatgagtcaaacgggcgatattacgaaccttcgcccggacgaaattatggtgtcggcatgaatattgcgtggagatttgagtaattaccttgatgcccggtatttgccgggcatttactttaacgattgtattgctggtataaaatagcaatattttgttgcataatttcagcaagacaatgtctgcatccctctttgtcttttgcttttaacgcagcgagtaacagatgatagttttctatatgctcccgtaattccgctggattaatcgcttcatagagataatgtaaaccaggccccatcctgacccacagttgctcaatcatctcacacaggatgggcatatttgagcgatgataaatcgctaagcgaaatagcctgtttacattaatgatttgttccatgtcgcccttttcttgcgcctgctgtaatttctcgagcaattcctggagttccgtcaggtcttgcggggtgaggtttgaggtagcctgagtttaacggacactccttcctgaaatagaatggcatcagaaggagctaataatgagcagaaaaacccaacgttactctaaagagttcaaagccgaagctgtcagaacggttcttgaaaatcaactttcgatcagtgaaggcgcttcccgattatctcttcctgaaggcactttaggacaatgggttaccgccgccagaaaagggctcggtactcctggttcccgcacggtggctgaactggaatctgaaattctgcaactgcgtaaggcgttaaatgaagctcgccttgagcgagatatattaaaaaaagcaacagcgtattttgcacaggagtcgctgaaaaatacgcgttaatcgaacaatggcgacaacaatttcccattgaagcgatgtgtcaggtatttggtgtatccaggagcggttattacaactgggtacagcatgaaccctcagacagaaaacaaagtgatgagcggctaaaactggagattaaggtggcacatatccgcactcgcgaaacatatggaacccggcggctccagacggagctggcagagaatggcatcatcgttggtcgtgaccgactggcacgtcttcgtaaggagctaaggctacgctgtaagcagaaacgcaagttcagagcgactacgaactcgaaccacaatctgccagttgcgccaaatctgctgaaccagacgttcgctcctacagcaccaaatcaggtctgggtggcggacctgacgtatgttgccacacaggagggatggttgtacctcgctggcatcaaagatgtttatacgtgcgaaattgtcggctacgccatgggagagcgcatgacaaaagagctgacaggtaaagccctgtttatggcgctcaggagccagcgcccacctgccgggctaatccaccactctgatcgaggttcacagtactgcgcatacgattaccgggtcatacaggagcagtttggtctgaaaacatcaatgtcgcgtaaaggtaactgttacgacaacgctccgatggaaagcttctggggaacgctgaaaaatgagagcctgagccactatcgttttaataaccgggatgaagccatctcagtaatacgggaatacattgagattttctacaatcgtcagcgtcgtcactctcgtctggggaatatctccccggcagccttcagggaaaaatatcatcagatggctgcttaaaaaaagaacaaatggtagtgtccgctattgccagtacacctcagttttcaacagccagagcaactgccattaattccagttcgtagcggatccgattgatttcgtctaattgacgtttccccacttccggaactgtaaatgcttgtgcaggtgcgacagaaagcgcattcaccgaaaccagacgtaataatgcttcacgcacaggtgtaatactcatacctaattgctccgccagatttttagtaatcaggcgtgcgccaggttttaatgcgccaatactaagctgatgtttcaggtcgttctcaacctgcagagtcaaactgacatgtttcatttttcccgttccaggcattttaattccttcgcgtgttttctgtccaaccctgcctgcacggcagaaggagttcacctggtgtattaaagtgaataatcataaaccacccacctttgttgttattagcagcagaacaatgacgtggttagttaattaaagctgaaaataagctttttgcctggatttttatggcggcttacgccgccgttgaaactttaatcatcacccgcgacgcggatcaccactttgccgaagtttttacccttcagcaggccgataaacgtctgtggcgcattctctaaaccgttgatgctgccaacttactgatttagtgtatgatggtgtttttgaggtgctccagtggcttctgtttctatcagctgtccctcctgttcagctactgacggggtggtgcgtaacggcaaaagcactgccggacatcagcgctatctctgctctcactgccgtaaaacatggcaactgcagttcacttacaccgcttctcaacccggtacgcaccagaaaatcattgatatggccatgaatggcgttggatgccgggcaactgcacgcattatgggcgttggcctcaacacgattttacgtcacttaaaaaactcaggccgcagtcggtaacctcgcgcatacagccgggcagtgacgtcatcgtctgcgcggaaatggacgaacagtggggctatgtcggggctaaatcgcgccagcgctggctgttttacgcgtatgacagtctccggaagacggttgttgcgcacgtattcggtgaacgcactatggcgacgctggggcgtcttatgagcctgctgtcaccctttgacgtggtgatatggatgacggatggctggccgctgtatgaatcccgcctgaagggaaagctgcacgtaatcagcaagcgatatacgcagcgaattgagcggcataacctgaatctgaggcagcacctggcacggctgggacggaagtcgctgtcgttctcaaaatcggtggagctgcatgacaaagtcatcgggcattatctgaacataaaacactatcaataagttggagtcattaccctctaaaccatcagtaatatcttcgtggtagtggattttatcctctttcacccattgccccatctccttctgaaactcatggatgcggtgaccataatcctgagcgataataaacccttgcaagcgaatacgttttttcagcaccgttgccatcaacaggggtaaacgatccggaccgggtggtagctctgtagcgttatagctgctcactaagccacaaacgggaatgcgcgcagatgtattaagtaatggtagcactgcatcaaataccttaccgcccacgttttcataatagatatcaataccttttgggcacgctttcaccagttgttcggcaaaatcatccgcgtggtgatcaagacaaacatcgaagcccagcacctcgatagcatggcggcatttttccgcgccaccggcaacccccaccaccctgcaacctttaagtttgccgatttgccccaccgttgctcccacaggacctgtcgccgcagctaccaccaacgtttcgccctctttaggctgaccgatatccagcagccccatataagcggtaaagcttggcatccccagcacacccagcgaccacgatggattttgcggatgatcgccaagtttcaccagatcatcaccactggatatgtcatagtcctgccatccactgtagcccagcacccagtcgccaggctgataatcaggatgattcgactccacaacacggctcaccgtgccgccgaccatcacgccgccaatatcaacaggcggtgaataagatggctcatcgctcatacgtccacgcatatacgggtccagggacaaataaactgtgcgcagtaacacctgtccttcacccggtgtggcgacatcatcttcttcaagacggaaattctccggaaccggtgcgccatgtggacgcgaggccagaacccaacgtcgattacgctgcttttgttgccccataatgctctcctgtgcttttggcatgaatccatcaatagtagcaggctcacgggattggttttgtttgcagccgtcacatcccctctgcaacacgcaataatttcatcgaggaatccgttgcttcgggctgttttcgatagtattgataacatcatcatcattattttatcgaggtcagacatgtccatccgttttgcccgcaaagccgattgtgctgccattgcggaaatttataaccacgccgtgttgtatacggcggctatctggaatgaccaaacggttgatgcagataaccgcattgcctggtttgaagcgcggaccatagcaggttatccggtgctggtaagtgaagaagatggcgtagtgacgggatatgcctcgtttggcgactggcgtagtttcgatggttttcgccataccgtggaacattcggtttatgtccatcccgatcatcagggcaaaggtctggggcgtaaattgttaagccgattgattgatgaagcgcgggattgcgggaagcatgtcatggtcgccgggatcgaatcgcaaaatcaggcctcgctgcatctgcaccattcgctgggatttgtcgtcaccgcacaaatgccgcaggtgggcactaaatttgggcgctggctggatctgacatttatgcagttgcaactcgacgaacgcactgaaccggacgcgattggatgaatcagtcgctcacccttgcttttttgattgccgccggaattggtctggtagtccagaacacgctgatggtgcgcatcacccagacctcctctaccattctcatcgccatgttgctgaactcactggtggggattgtgctctttgtttctattttatggtttaaacaaggcatggcggggtttggcgaactggtgtccagcgtgcgctggtggacacttatacccggcttgctgggatcgttttttgtcttcgccagtatcagcggatatcagaatgtgggagcggcgacaactattgcagtactggtcgccagccagctaattggcggtctgatgctggatatcttccgcagtcatggcgtaccactacgggcgttgttcggcccaatttgtggcgcaattttacttgtggttggcgcctggttggtagccagacgctcattttaatcagaggatggtgccgcctttggttaactgttcgtggcgcgcttccatatcttctttatgcttgcgaccgtgatgagcaatagcggtgcgcaaacgctgctgctgggtgtagcgatcttcccgacttaactccgcgtcatcgctcagggcgattaataattcgttcatatgggcaatgacgctctcttcaatcgcggcatccacgcgcgcgatgacttcatccagatgcgacatactttctccttaaccacttgtgaaatttatcgattcatccaaatgatataagtctgcgtggtgccgtcaagccagtgagtaagatttaaaacagtgaaaacaacagcgccaccgggaaactcatcggccatgttgcccccaccagaaaggcgcttaagaaacggatgcgtttcttatcgtgagaaagaaaccaggtgataagaaatgcgattgctgccataaccgcataaaaaacaagcatatgttgatagagagacatgtacgggcgtccagccagatgaataaaacgcgcgcaaatatgcgtcattttttgacgtgcatcaagttttttcaccagtttgagaaaaaatcatcaaacagcaacttgcccttatccatcttcagaatgagtattattgcggattttcttaacccgtactatacacataggggcaatgataaaaggtggcaaaaatgaatgtttccagtagaactgtagtactgataaatgtctttgctgctgttggtttgtttactcttatctctatgagatttggctggtttatttgatgggtaatgactccaacttattgatagtgttttatgttcagataatgcccgatgactttgtcatgcagctccaccgattttgagaacgacagcgacttccgtcccagccgtgccaggtgctgcctcagattcaggttatgccgctcaattcgctgcgtatatcgcttgctgattacgtgcagctttcccttcaggcgggattcatacagcggccagccatccgtcatccatatcaccacgtcaaagggtgacagcaggctcataagacgccccagcgtcgccatagtgcgttcaccgaatacgtgcgcaacaaccgtcttccggagactgtcatacgcgtaaaacagccagcgctggcgcgatttagccccgacatagccccactgttcgtccatttccgcgcagacgatgacgtcactgcccggctgtatgcgcgaggttaccgactgcggcctgagttttttaagtgacgtaaaatcgtgttgaggccaacgcccataatgcgtgcagttgcccggcatccaacgccattcatggccatatcaatgattttctggtgcgtaccgggttgagaagcggtgtaagtgaactgcagttgccatgttttacggcagtgagagcagagatagcgctgatgtccggcagtgcttttgccgttacgcaccaccccgtcagtagctgaacaggagggacagctgatagaaacagaagccactggagcacctcaaaaacaccatcatacactaaatcagtaagttggcagcatcaccaaaagattttattatccatacaaaactcaaagtgttttttcgtccatctgaaggtaagggttttatttttatcttccgtgaatttgtacaattgaactttcattgttaatacttctacttataaattattagtttaataacgatactctaaagccttatgctaatcaactgtgacaggatgaaaaatcgccatcaaacatttagcctaatttttacgctagttattaatgtaatcattctaatacttaaccgccattaaactcagaacctaaaacgatagtggccgtcctataacagccactaacatctaacttaatgtttaaccatgacgtggcggacgacggtgtaatcctccagcccataaagtgacatatccttgccgtaaccagaaagtttctgcccaccgtgcggcatttcacttaccagcatgaaatgggtattgacccaggtacaaccatattgcagccgtgcgctgacgcgatgcgccctgcccacatctttcgtccataccgaagatgcaagtccgtactggctgtcattcgcccagttcaccacctgttcttcgttgtcgaagggcgtaacactcactactggaccaaatacctctttttgcacgatggcatcgtcctgtaatgcgccagccagcagcgtcggcgcatagtaatagccattacccttgcgcttttcaccgccagtgatcactttgatgtgccctgtcgctttcgcctcttctactgccttgctgacgcgttcgagatgcgccagcgagcttaaaggtccaagctccgtagactcgtcatccggcgcaccagattttaacgttgccaccgcagcacccagtttttccaccagcgtatcgtaaatgcctttttgcgcgtagatccgacaagccgcagtacaatcctgtccagcattgtaatagccaaatgtacgtacaccttcgaccactgcttcaatatccgcatcatcaaaaacaatcactggcgctttgccaccaagttccatatgagtacgcttaatggacgacgcggtatggctgatgatgtgctcgccggtggcgatagagcccgtcagcgacaccatccgcactttgggatgaccggtcagcggatcacccaccgttttgcctctgccaaacagtatgttaatcacgcctgccgggaagatatctttcgccagctctgccaacttcaacgcggtcagcggggtaatttctgatggtttaagcactacgcagttccctgccgccagcgccggagcaagtttccacgcggccatcatcagcggataattccacggtgcgatagaagccacgacccccaacggatcgcgacggatcatcgaagtatgaccttcaagatattcacctgccgccagaccattcagacagcgcgccgcacccgcgaaaaagcgaaaaacatcgacaatcgccgggatttcatcattgaacgcactatgcagcggtttgccacaattacgggactccagttcggcaaaaacctgaccattttcttcgataacatcagccagtttcagcagacattccgcacgcactttcggcgtggtttgcccccattcggcaaatgctgcatctgccgcgcgcacagcagcatcgacctgctctgcggatgcctcggcaatttccagtaaaacgtcccccgttgccggattatagacaggctgtttttccccttcgccgctaaccagttctccgttaatcagtaacttatgttgcatagcatattcctgtatcagtggttattgaccattgtcgccttcgcgggttagccaccaggcccccaggatcggcaaggttgttaccaacataaccagcagtgccaccacgttagttaccggtacatcacgcggtcgcccaagctgattgagcaaccacaacagtaacgttcgttcatgacctgccgtaaaggtcgtaacgatgatttcatcgaacgacaaggcaaacgccagcattcctcctgccagtaacgccgaactgagattcggcaacactacgtagcggaaggtttgccagccattggccccaagatccattgacgcctcaaccagactccaggaggtgcggcgaaaacgggcgatgacattgttaaacaccacaactacacaaaaagtcgcatgaccgaccacgatggtgaaaaatcccggctccagattgatggttttaaaggcggttaataacgccagaccagtgacgctgcccggcagcgcaatgggcagcagcagtaacagcgaaatggcgtttttgccgaaaaagtctcgtcgccacagcgcggcagctgccagcgtccctaacaccagcgcaattaatgtcgccagcgccgccactttaagtgacagtgtcacggcatcaagaatatcactacgctgtgctgccacgctaaaccagcgcagcgtcaggccctgcggtggaaaactaaacgccgcatcttcagtgttaaacgcataggcggcgattatcaggatgggaaaatgtaggaaaacaacgccgccccaggccgccagtttgaggaaaaacggtgcgcgttcagagtgcatcgaacgctcccagacgtttcacgaacgccaggtacagtgcgatgagaataatcggcaccagggtgaatgccgccgccatcggcatattgccaatcgccccctgctgggaataaaccatattgccgataaaatatcctggaggaccaaccagctgcgggacgataaaatcgcccagtgtgagtgagaaggtaaagatagagccagcggcaatacccgggattgccagcggcagcaccacatagcgaaaggtttgtcgtggacgtgcgccgagatcagccgacgcctgcaacaatgacggcggcaaacgctcaagcgccgcctgaacgggcaggatcatgaacggcaaccagatatagagaaacaccagaaagcgccccagcccggaagttgacagcgtatttccgcccaccgcaggtaatgtaaggaacgcagtcagcagtggttccagcccaagatgttgtaaaaaccactgagccacgccatcttttgccagcaataacgtccaggcataggctttaacaatgtagctcgcccacatcggcaacattaccgcaatataaaaacgctttcattttcccgctggtatagcgcgccatataccacgccattggaaaagccagaatggcgctggcgatagtgactgccacagccatagtcagcgtgcggagaatgatgtcgtaattcgccggattaaacagcgcacggatattcgccagcgtcagttccggcgttaccgacatggtgaaatcgtcaaaagtataaaatccctgccataacagtgtcagcagcgagccgaaatagacaatgccaaaccacattagcgggccaagcagcagtaaaaacagccccagacctggacgtgaaggtgattgcaatacattcatcgccattcacctctcctcaaccagcggcaccatcacatcacgcgaccaggaaaccatcacctgttgtccgggcgtgagcgtggcaggcagttcttcgcctgtcatattggcctgactcacaagcagtttttcaccgccgttcaatttcagttcaaaacgagttgccgcgccctgatattgcaccgcctggatcgtgccattggcctgcagttcaccaggggtgttgaggcggatatgttccggtcgcagggcgaagcttcccgtcatgccacaaagtttctctgccatcagtccatcaaaaacattcgatgtaccaacgaacccggcaacaaacggcgtgcgcgggcgcatatagagatcgcgcggggaatcgacctgctcaatgcgtccattattgaaaaccgccacacgatcggacatcgataacgcttcgccctgatcgtgggtaacgaagataaaagtgataccgagagactgttgcagttttttcagttccagctgcatctgctcacgcaatttgagatccagtgcgccgagcggttcatccaacagcaatacgcgcggttcattcaccaatgctctggcgatagcaacccgctggcgctgaccaccagaaagttgtgacggtttacgttgctgtacaaaccccaacgccactttctccagcgcctcttgcgccattgcgtgccgctgctttttattcacgcctttgaccatcagcccataggcgacattgtcaagaatcgacatatgcggaaatagcgcgtagtcctgaaagacagtattcacgtcccgctcccacggtggcagattgctggcgggtttaccaaagatagagatagccccgccggaaagctgttcgaagccagcaatcaggcgcaggcaggtggttttgccggagccggacggccccagcatagagaagaactcaccatcttttatcgcaatactgacgccatctactgcgcgcacgtcaccgtacaaccgcgagacgttgtcaaactccactgcgtacgtcataaagcaccccagcgaagttagcgaccgcccataatggcaatgtaatcctgcgtccagcgactgtagggaacaaacttgcccccttctgctataggcgttttccagaaggcgattttgtcgaaatagttaaaaccgttggtttcacaacctttttcgcctaataacggactggctttacacccttccggcactaccggtaacgagccaaaccaggccgccacatcgccctgcacttttggcgttaatgaccagttcatccatttgtaggcgcaaaccggatgtttcgcttcgctatgcagcatggtggtatcagcccaaccggtaacaccctccttcgggaaaacggtagcaacaggctggccttcggctttcagggcgttggcctgatagggccaggcactggaagcaaccacaccctcgtttttgaaatcgctcatttgcacggtagtgtcatgccagtagcgatggatcaaactgtgttgagcgcgcagcactttcagcaccgcctggtactgttcttcggttagttgatacggatcgctgatgcccaactgcggctgagtggctttaacgaacaacgcagcgtccgcaatgtagatagggccatcataagcctgaacgcggcctttattgctcttgccgtccggcagattttgctcaacaaaaaccacttgccagctatccggcggcgtcgggaaggttttagtgttgtacatcagcaggttcggcccccattggtaaggtgtgccgtaaactttgccgccaacattaaaccagtcgcctttaaccacgcgcggatcgagcgttttccagttgggaatcaaggcggtattaatcggctgcacgcgtttgcccataatcaaacgcagcgaggcatcgccggatgccgtaaccagatcgtaaccccctttggtcatcagactgaccatttcatcggaagtcgcggcggttttcacattcaccgcgcagcctgtctctttttcaaattgcgttacccagtcgtattgtttatcagtttgtccgcgttcgatgtatcccggccaggcgataatatccagtcgcccttccggtttatctaaattggtaggtggttcggcggcgtgagcggtcattattgtcatggtgagcgcacacaggctgctgcgggcaaatgtcttgctcataaggtcttactcctgtcgtaattaattgttcagccgccgtgccgtaaaaatatctccttgtttaaccatagacggcggcttgcaggcacaccttcgtccctgagaaaatttaatcaggttgtgagctaccgcgcattatgccgtctgtaaggttatcttctggagtatagacaaggggttaggaaatatgactgctattcgaaattcatattacccaatctaagaggaattaaattaaacgctattacagccgttcttgaataagtttgcctaattgttttaccgcctgttcttcacgttctccccactgccacgcggtattaaaacgaaaaaaacgtgaccagttttcaccggtagaaaacattttacccggcgcaatactgatatgatgcgtcagtgccgccaggcttaattcgccggcatctaacggctcggggagctccagccagagaaaataaccgctgtcactatgatgaattttaacttccgcaggcagataacgcagcagtgcctgccaggcacgttgtttacgttccgcaagctggcgacgcaggcgacgaagatgggcgtcgtatcggcgcgtggaaaggtaatccaccagcgcaagttgcatcggtgagctggtggaaagcgtactcatcaactgcaagcgttgaattttacgtgcatgttttccggcggcgacccaaccaatacgaaaaccaggcaccagacatttcgaaaacgaagagcaatgcaaaacgccatcgtggcgatcccacgctttcgcaggcagcggtttttcccgtccaaaataaagttcgctgtaaacgtcatcttcaatcagcgttacgttgtactgattgagtaacgccaccagttgtgcttttttttgcggcgttaaggtaaatccgagtgggttctggctattagtcatcagccagcacgctttcaccggataatcctgcaacgccagttccagcgcctgaagatcgatcccttctttaacatccgtcgccaccgataacgccttcagccgtagccgctccagcgcctgcaacgcaccgtagaaacaaggattctctactatcacccaatcgcccggttcagttaccgcttgcaaactgaggtttaatgcctctaacgccccggcagtaatgacaatttcatcaggagaaatggtgatgccctgtaaggcatagcgacgagcaatagcctgacgcagttctgcgtttcctggcggtaagttttcaatcacgctcatcgctgtggcggttttgcttacctgcgccagcgagcggtttagttgttggagggggaaaagtcgcgggtcgggaaaggccgaggcaaacggaacgaccgacggttcgcgactggcctgcaacatatcaaaaatataagtgttgatatcgactgcttcatctcaagtgactggaatgactggcgctttcggcatttttattgcctgtggcgcaacgtaataacccgactgcggtcgtgcgataatatatccctgactttcgagcaactgataggcatggctgacagtcataaagctcatgcctgaaagcgccacctggtcacgcaacgaaggcaaacgatcgccgggttgccagatacccgacgcaatctgctcgcgtaattgttctgcaagctgctggtattttttcattatcgaatcgtaattatgtgcagatgattcggcagtctatatcagttgttaaaaatgacaacttttcgttaactgtaattaaaccatcaccagcgataactctttgccaagcgcctttgccgcaagctggacggcgtcgatttttgtcgcatggtgcaagttaaataggcgagtaatctcctgtttaggtttgccaattcgcctggctaactcttgctgagtgatttctgactgtaaaaaagcatttaacagcaatactttagaggcgacgctcaaaggtacttcaataaagtgatcatgactatttaatggcgaaggtaacgggataagctcgttatcttcaaaataaaaatcaaatgcggtcagtaaagcatcttttgccgcttccatcgcttcagcgacagtttcgccctgcgtcaacgcttcagggatatccacaaaagaaaccatataaccgccttccggcgcgggtgtaagagtgacgggataacgcataatttcgactgtctctcgcatgtcattaacctttttaattggcgattaactcaaaccgagttgtttcaggattgctttacgcaggagtgacgcggcatgacactgcgcctcccatgaaacctgagtttcaaatggttgcggccattcgctacatcgacgccctgagattcgagccaacgtctgaactcgctttgtttcacatcgcctccctgccgctgagtatatcaataaagtaaacattagtgtttacccctatgtgtaatttgctcgaaaatagcactaaatcgccgcaacggcagaatgcaatgcaaaatcaggaaggaagattccagaatttctttgcgctaatttgcaaaactgaataataacctcaagaaacgatcggcatcatagcggcaaaaggtaagaaaaaggtggcaggatgtttacgaaggcgttatcggttgtcttattaacgtgtgcgctgttctcaggacaactcatggcagggcacaaaggacatgaatttgtgtgggtaaagaatgtggatcatcagctgcgtcatgaagcggacagcgatgaattgcgtgctgtggcggaagagtcggcggaaggtttgcgcgagcatttttactggcaaaaatcgcgcaaaccagaagcgggacaacgttgagtcgtttgatgccggatgcggcgtgacgccttacccggcaggcaatatcatgcagattcaatgagttgtgagtaaccagaaaactggcgttttacccttttcgcttaggcaatgttttcagcagctcatccggacttacggatgccactacgcttcccggtaacggcattttcagtatgtgatttttgattttgccaatgacgtgcatctcgcatgggcggcaatcaaactttagcgttaatacttcatcgccgttaaccagttgcattggcgtcgccttccagcttttgatattgcctttcgcctgtttcgggcacagattaaaggcaaagcgcagacaatgcttggtgatcatcaccgggacttcgcccttctcttcatgtgcctcatacgccgcgtcaatcagctgcacaccatagcgatgataaaattcacgcgctttctggttgtatacgttcgcgaggaaactcagatgcgtttgcggaaaaaccggcgcaggatcagcaaccggtttacggctgccgcgctggtaactggcaagacgcgcagcatccagcatgtcagcagcttcacggcggaactggtttaacagactgtttggtacaaacagcgcccccggcaaattaatttgcacatcgcgggcgtaatagagggtttgccccagttttgccagaccatccttcagattgttcattgctttttcggcgttattggcttcgtcgaactgcccgtccagcgtatgcgtgatgctgacaccctcttcactggtgagggtcagaatcagttgttcctgccagccgcccagttcaatgtctaccgccacccgacgttcgctagaggtttttgtcagtgcctgctgccagttatgatcaagattacggtttagtgggtgatgtggacgaattttgtgcaaatctgctggcatttcattgggccagacgcggtactgattttctccggttttctcgaccgtattggcacgaaaaccgatgacttcacgtttaatcatcacgttcaggccatcaccatttgccagtggctcggtgacggcaacattgagatgatctttcgccactttcaatacttcacccaccggcaggccgataaatttcggcgaatcgaacgcgccaatatcgcctttacgggcattcacaaaataatctgtgctaccacggtggaaagtcttttccgtcgatggaacaaagaaatgttcagtacgacctgatgaagcacgcgtcagatcgccacgttcttcaataatggcatccagcatctggcgataatgggcggtgatattcttcacgtagctcatatctttgtaacgcccttcaatcttgaaggagcgtacgccagcatcaatcagcgcgccgaggttagcagtctgatcgttatctttcatcgacagcagatgtttttcataggaaaccacccgcccctgatcgtctttcaatgtgtatggcaaacggcacgcctgcgagcaatcgccacggttggcgctacgccctgtttgcgcatgagaaatgtagcactgacccgaataggccacgcacagtgccccatgaataaagaattcaatggtcgcgtccgtagcctggtgaatcgcgcggatctgatcaagattcagctctcgcgccagcacaatctgcgtgaagccaacatcagagaggaacttcgctttttcaactgtacgaatgtcgcactgcgtactggcgtgcagttcaatcggcggaatatcaagttccagaatccccatatcctgaacaatcagcgcatcgacaccggtctggtagaggtcagtaatcagccgttgcgcgggttccagctcatcatcatgcaaaatggtgttaagcgtgacgaaaatttttgcaccataacgatgggcaaacggcaccagctcggcaatatctttcaggctattactggcattatgacgggcaccaaaaccagggccgccgatataaacagcatcggcaccgtgcaaaatagcttcgcgggcaatggcggcatcgcgtgccgggcttaacagttcaagtcgatgagaagatacggtcacattcttatccagtagctgaaaaatggcggctattttagccacaagcgcgacgttgcgaaatagttttcccgcttaactgcgcgggtaatggatgagggaatgaaaatgtacggtttgctccccaccattacgatagatatgcgtgacgtctgcagcaaatcgaacgccttccccacaattaagggtctgccattccccatcaacgcacagatcaagttgtccatcaatgacgacgacatgttcgattacccccttctcatggggcgtcgattcgcttattgcaccagatgccatctgaatcgagaagtgttcaaagcagagttgtggatcataaggaaacagcgaagtgatcaccatcgcctgctgttgtggatcataaactgaaggcatagcggactgcggcggagaaataaatgttgaaaatggtacgttcaacccggtggcaattttccataatgtcgcgaccgtcggactggactcattacgctcaatctgccctaacattgctttagaaacgcccgtcgcttctgccagtcgcgaaagactccagccgcgctgctggcgtagttgtttaagtgtagtggataaaaagcgagcgagattttccatgcgactcctccggcaaaacggaagtttatcacttgtgcgttataacggacaaatgctacggtgcctgtacgctataacgcacgaggtgactatgcgtctgttttctattcctccacccacgctactggcggggtttctggcggtattaattggctacgccagttcagcggcaataatctggcaagcagcgattgtcgccggagccaccactgcacaaatctctggctggatgacggcgctggggctggcaatgggcgtcagtacgctgactctgacattatggtatcgcgtacctgttctcaccgcatggtcaacgcctggcgcggctttgttggtcaccggattgcagggactaacacttaacgaagccatcggcgtttttattgtcaccaacgcgttaatagtcctctgcggcataacgggactctttgctcgtctgatgcgcattattccgcactcgcttgcggcggcaatgcttgccgggattttattacgctttggtttacaggcgtttgccagtctggacggtcaatttacgttgtgtggaagtatgttgctggtatggctggcaaccaaggccgttgcgccgcgctatgcggtaattgccgcgatgattattgggatcgtgatcgttatcgcgcaaggtgacgttgtcacaactgatgttgtctttaaacccgttctccccacttatattacccctgatttttcgtttgctcacagcctgagcgttgcactccccctttttctggtgacgatggcatcgcaaaacgcaccgggtatcgcagcaatgaaagcagctggatattcggctcctgtttcgccattaattgtatttactggattgctggcactggttttttcccctttcggcgtttattccgtcggtattgcggcaatcaccgcggctatttgccaaagcccggaagcgcatccggataaagatcaacgttggctggcagctgccgttgcaggcattttctatttgctcgcaggtctgtttggtagtgaggtgtactggcaatagcggacactaccatttgttctttttttaagcagccatctgatgatatttttccctgaaggctgccggggagatattccccagacgagagtgacgacgctgacgattgtagaaaatctcaatgtattcccgtattactgagatggcttcatcccggttattaaaacgatagtggctcaggctctcatttttcagcgttccccagaagctttccatcggagcgttgtcgtaacagttacctttacgcgacattgatgttttcagaccagactgctcctgtatgacccggtaatcgtatgcgcagtactgtgaacctcgatcagagtggtggattagcccggcaggtgggcgctggctcctgagcgccataaacagggctttacctgtcagctcttttgtcatgcgctctcccatggcgtagccgacaatttcgcacgtataaacatctttgatgccagcgaggtacaaccatccctcctgtgtggcaacatacgtcaggtccgccacccagacctgatttggtgctgtaggagcgaacgtctggttcagcagatttggcgcaactggcagattgtggttcgagttcgtagtcgctctgaacttgcgtttctgcttacagcgtagccttagctccttacgaagacgtgccagtcggtcacgaccaacgatgatgccattctctgccagctccgtctggagccgccgggttccatatgtttcgcgagtgcggatatgtgccaccttaatctccagttttagccgctcatcactttgttttctgtctgagggttcatgctgtacccagttgtaataaccgctcctggatacaccaaatacctgacacatcgcttcaatgggaaattgttgtcgccattgttcgattaacgcgtatttttcagcgactcctgtgcaaaatacgctgttgctttttttaatatatctcgctcaaggcgagcttcatttaacgccttacgcagttgcagaatttcagattccagttcagccaccgtgcgggaaccaggagtaccgagcccttttctggcggcggtaacccattgtcctaaagtgccttcaggaagagataatcgggaagcgccttcactgatcgaaagttgattttcaagaaccgttctgacagcttcggctttgaactctttagagtaacgttgggtttttctgctcattattagctccttctgatgccattctatttcaggaaggagtgtccgttaaactcaggctacctcagatggctgccctgcccgtaagttggatccagatgctggcaggtctggcgctgttgagtaccattggcggcagtttgtatcaggcgctgcataatgagcgtgagcgtgagcgcgacgcggcggtggtggcatttctggtaacggcaagtggattgacgctggtcgggattggttctgcgttctggggattaattgccggaggcgtttgttacgtggtgttgaatttaatcgctgacagaaaccgatattgacatcctccacgccctgaaggacgtggatccctgctacgttcaggctgtcgcctgaatcatttcggtgggttcctgcttcaacgggcggcctgactgcaccatctctccacaggcaagaacggcgtgccccgccgctaaaatgttacgagcaccatttacatcggcgttcgctgtatatccacatacctggcatctgaatttactttgtgacaggcggttctctttcgctgtatgaccacagtacgcgcaacgctggcttgtatacgctggcggaacagcaagcacctgaccgccacgccagagctgcttgtactcaagctggcggtgcatttcataccagccctgatccagtatcgaacggtttaaacctgattttgcccggacattgcgccccggctggctgaccgtacccgctgctgactttgacatgttgctgaccttcaaatcctcaatgactatcattgcgtggtttttgctgacggccgttgtgactttgtgaaggtagtccctgcggatatttgcgatacaggaatgcagtcgctgtattttgcgtttctgcttctgccagttgttgctgaatttgaccttgcggcttaactgtcgctgaagtctcgccagcgtcttctggtttttctgaaaactgtttacaggctcaaagactgtgccatctgacagcgtggcgagtttagccacgccagcatccagcccgaccattgatgctgaagggtgagccggagtggatacttcactttctgtctgaatactgatgtaccacgtaccgcaggactggctgacagtgacatttttcacaacacccgtgacctgacggctattccggtagcgcatccagcccagtttcggcagaaaaatacggctgttttcctgatcgagcttaacgccctgcgggtagcggaatgcatcattctgtccccgctttttgaatcggggaaaagcagcccgcttccggaagaagtttttgtaagcccgctcaaggtctttcagtgactgttgcaatggctgtgagggagaatctttaagccattgcgtttcagtggcatttttccactcaaccagccaggaagccattttcccgtaagggatgtatttattaccggcctcatgattctcattctgacgtgccagagcacgattgaaaacgaaacgacatgcgcctgcgaagcgcctcatttcacactcctgttgaccacctggtcttaactggaatttaaatgcctgtaatcgtttcacaggtcaaatgatactttggtctgtgaaaaaagaaaccgatatccggcgtggaaggcattgtgttttcctgatgcatgttcacctggtctttgtcactagataccgacgccagattttttgacgcgacagaaaaactacgcacttacttttcaaatgtatgtgcttattttgaagctgaactggttgaaatggatggcgaaccagatcacgtccatttgttaattaactaacctcccaaactggcgatatccagtctggtaaacagcctcaaaggcgtatcgggtaggttactgcgacgagatcgaccagatattgcagtcaggtattactacaaaggcgttttgtggagtcctggctattttgccagtagctgcggaggtgtgccaatatccgtcatccgccaatacattgaacaacagcaaacacctggtcaggtggaaaaccgcgccttatatccccgccctgaaggatggggttttacggcgcaccggataaaaagcgccatctaacgatggcgcgtctggaactactttttgttaacgtcaaacatggtggcatcggtcgccatgtcatcaataacttgtttaatattttcgaaagccattggcgtactttcgttattcaggtctttaccttcgccctgacgaacgactttgataaccggtttattagtcgctgcatcaatcagctcaccttcaaaatagaggcgagtatccatggtacggtggcctgtagccatttgcgtccccgcaaccactaatgcaacaggaaccacttcatagaattgcagcccttctttgctggtatctacaccggtaatggccccacggaaaatcagactacgcggcccagcggtggtaaccagtggtttacgctgcgctatcgcttctttcatttcggtgttggtatagttcaaaattttatccagaactttctgccctacctaggtagaaggttttggcaccggataataagtgattgggttccagacgatgctgtcatatttgctttgatcaaaactcgggtctacccaacgtaaaacaggtttacctgttgctgaggttgtttcttttaaatcagagtaattgtttaaaaaaccagaatatttatctggctgggtgattttagaggcacaaccagacagagccaacaagccgcataaagctgcaactttcgcaaatgatgtggtacgcatgaatagtttcctgagatgggtaatgactccaacttattgatagtgttttatgttcagataatgcccgatgactttgtcatgcagctccaccgattttgagaacgacagcgacttccgtcccagccgtgccaggtgctgcctcagattcaggttatgccgctcaattcgctgcgtatatcgcttgctgattacgtgcagctttcccttcaggcgggattcatacagcggccagccatccgtcatccatatcaccacgtcaaagggtgacagcaggctcataagacgccccagcgtcgccatagtgcgttcaccgaatacgtgcgcaacaaccgtcttccggagactgtcatacgcgtaaaacagccagcgctggcgcgatttagccccgacatagccccactgttcgtccatttccgcgcagacgatgacgtcactgcccggctgtatgcgcgaggttaccgactgcggcctgagttttttaagtgacgtaaaatcgtgttgaggccaacgcccataatgcgtgcagttgcccggcatccaacgccattcatggccatatcaatgattttctggtgcgtaccgggttgagaagcggtgtaagtgaactgcagttgccatgttttacggcagtgagagcagagatagcgctgatgtccggcagtgcttttgccgttacgcaccaccccgtcagtagctgaacaggagggacagctgatagaaacagaagccactggagcacctcaaaaacaccatcatacactaaatcagtaagttggcagcatcacccctgagatgattatattactttttaagttatagcaaaaagcgccgcttcgtgttgtggcaaaaaaagtgttggtgaaaataaatttttcagccccttttcagacgacatagtcaatgccgaaaaaggggctaagtcaatcatcagtagttaaatttcagtaagttaagctgctaaaaaacttcgactactgtgattaatttcacatcccttcgataaaaaatatgcttaccgaaaagaagaacagtaaatcatctcagcgtggggaattttcacgcgccttattcttagcgggtcattttttacgtgccagcatcgtggcgaaacgcagtttaatacgattaccgttggcgtcggtgcggtgcagctcgccgacgtcttcattgtatttcaccctctcccagccttcgtaatatcgacgtaattctccctctttgaaggcaaacgggaagccgacggtacatggataatcagcggtatccatcgccgccacaatcaggttgtaaccaccaggtttagtgcaacgttgcatattggcaatcagccctgggatggttttagcctcaaggaacatcagtaccacagtcgaaagaataaaatcgtactgtctatcaaatgtgaggttattcagatcaacgactcgggtgtgtaaattatccagattttcaatggatttaatgcgctctacattggcgatactcatggcatttttatcccatgcgtcaacatcataaccattggctgccaggtaaagactgttacgaccattgccacagcccagatccagcgttttacccggtttaaccactttcaccgcttccagtacttcagagtgtgtgcgggttaattcatatttatcagtaaaatagttttcgtcacgaatgatcattctttgtcctctgctttcattaaaacggcgcgctcggttctgactaacaattttccctgcatcagaagcgcaaaagtacggatgagcagtattgcaataataaaattggtaaagataaacagcggtaccgccagcgtatggaaaaatccattttcgctgccactccccagatgcaaaccggtggttgccagtgcagatacgccgaacgagaaactccagaatgaagcattaaatggctgggagagataccatggcatcagacgtagcataaacagcagttgcagcagtccataaccaaaaagcattttcgccagcgtatcaccctcgccgccgttgacgctcaaccaggcactacaggccaccagcgcaggagcgagctgaatgccgagtgatgtccgcagtgccgtgggtaattctcccgaactgcgcagacgctgcaagatcaccggttcaagacttagccatgagaaaacgcctgcgcctaaaaacaccagaccggcgtcggtgtagcccaacgcaccacaggccattgcgctgataaagttgttggcaactgtcggcagatacagtccaggcgtggtagcttcttcagggtgagatccgcgccataatcccgcagtttgccaggcggcataagccaactgaaccacgacaccaaaactgaacaggcacaccgccagtgggcgaaaccacggaacaaaaccaatcgccaccagcatcgtcgttgccggaaacaaactcacaaaactgctcagcactggatggcgaacttccgccagcacgctatgcggaaagcgtatgagtcgggtaataaatgcgctagttaataatccccagatgatcatcgccagaatcaccagcccatcccctaaccagtggctgacctgccaaacctggctggcatagcgccaggcaaatcccatccctatcgtccccaacacaataccaaagtagcctgccggcaaattgagcactttatcgctctgcatcttcttactcattttgtttaatttataaagtatatttgaaatgcattttatggaattttctcgagcatagccagagccgcagaatttgctacggttatagtaagtcacctgtgagaaaacgctatgcgcaaatatcgtctaagtgaagaacagcgagcctttagttatcaggaagatggcactaaaaaaagtgtgttattacggcagattatcgccattagcgattttaacgatgtgatagcaggaaccgctggcggctggatcgatcgcgaaacggtgttagcacaggaaggaaattgctggatttacgaccagaatgctattgcgttcggcggaacggtgatttctggtaatacgcgtatcaccggcaccagcgtgctgtggggagaggtttacgcaacggataacgtctggatcgataatagtgaaatcagccagggtgcatatataagtgacagtgtcaccattcgtgactcattagtttacgggcaatgtagaatatttggtcacgccttaattgatcaacattctatgatcgtcgccgcacaaggcttaacgcccgaccatcaactcctgctccaaatttatgatcgcgcaagggttagcgcctcgcgtattgtccaccaggcacaaatttatggcgatgccgtcgtccggtatgcttttattgaacatcgcgccgaagtttttgattttgccagtgttgaaggtaatgaagagaacaacgtctggctatgcgattgcgctaaagtctacggtcacgcgcaggtgaaagctggcatagaagaagatgccattccgacgattcattacagttcgcaggtggcggaatatgccattgtggaaggtaattgtgtgttaaaacatcatgtcttgattggcggaaatgccgtggtacgtggtggaccgattctgctcgacgagcacgttgtaatacaaggtgagagccgtatttcaggtgcggtgataattgaaaaccatgtggagttaaccgaccacgccgtcgttgaagcctttgatggcgacacggttcatgtccgtggtccaaaagtcattaacggcgaggagcgcattacgcgaacgccgctggcagggttattatgaatcgataatacgcgcgtataagttcacatcatcataggcatcattcaggaactcagcctgtttcaggcaaccttcaaggataaaaccattgcgcaaagcgacctggttgctttgcggattgtccacccgacatttgatcacgaagcgtctaagttcaccagactgagcgtaatgatgaatcaatgcctgcagcgcctgagaaatgatcccctgcccctgatgagattcgtccagccagtagccgatttcagcagttttattcagtggttcaatacgattaaacgagataacgccgataagttcatcttctttgaaaatcatgaacattttggcatagccgcgttgatgcaacatcacattaccctgcaccgtttttcgcgtgtcctcttcactctgaacgaactgcggccagtttagcgactgctgtaaccaggttttatttttacagattaactgataaagaggtgtgacgtgactttccgcaacagcatgtaattcaagtgattcgcttacttttatcgtttcagtcatcttatctccagtcaatccatgctgttgttaaaaaagccgcctggctggcggcttaggaaagtttacacctctttgacgctctcctgctgcaggattttgagcatctcatcttttaactgtagcttttgttttttcatgcggaccacttccgcattgtaccctcgaccgtcggaaccttcctttctggcaatttcatgatcaagtttattgtgtttatcgaacaaggacataaagcgaggattttcgtttttcagacgggatattaaatctcggtattctggaaacatacgcactccctgttagtggctgacaaggtgtatctgaaatacacaccatcagattactcatttaacttagggaaaaatgcgagcgggatcgtgtttaaccagacggcacctcccgaagaaggtgccgaagaaaaaacgattaactcatcacgcggtcgtcaacatactgacgtttatccggcgctggcgggaaatactgatacagccatgtttcactgatagcgtccccctgacaacgtagatacatccgcatatcgaccggatcagtagagtccgaagtcggataccagtcaaactgaatacgataaccatcgatgggttcaatatagagaatttcgatttgcttcgcttccccactggaaagcgtaatcaccggctcaatgccttttggcgcggcagctttcagatcaccaccaacgaaatcgacggcaaaacgacgcgcccatttttcgggatagtgttcacctggcgcccaaccttccgggaaaccgcccatgccggtacgcgtcgccataacgcgcgctaatgggcaatgaacaggcggttgcgcactccagtacagacgatactggaatgcaaactcatcacctgcttttacagctttttctggctgccagaagcagacaatgttatccagcgtttcgcccgttgttgggatttccatcaggccgatggtgcccttaccccacttgttacgcggttccacccacaaacttgggcgtttgttataccagcccataatgtcctgataatgggagaagtcacgatccagttgcaataaaccaaaccctttcgggttgttgtcggtgtaagcattgaactgcaatttttgcggattgttcagcggacggcaaatccactcgccgttgccccgccacatggacagacgatcagagtcatgaatttgcggatgaatggtgtcgcacatccgacgttcattagtaccgcagctgaacatactggtcatcggcgcaatgcccagctgtttaatgtctttgcgcgcatacaggtgattttccacatccataatcacctgacttttctcacaatggatagtgaacttataggcaccagtaatactggcgctatcgagcaacgcataaacggtaaaggtagttgcccccggttttaccgtatcaaaccagaaggcggtaaagtcggggaactcttctttactgtcggtgtaagtgtcgatcgccaggccgcgggccgacaaaccgtattgatatgtatcatcaacggcgcggaaataactcgcgccgagaaatgatactacatcacggcgcgccagttcgggggctttaaacacgcgaaaaccggcaaagccgagatcgctttgcccttctaattgtttggtatcaacacctgcatcgttgtatttgaacaactccgggcgaaagtgaatttcacgcgccagatgtgttgctggatctacagaaaacatacgaacgcggcgacggaatcccattcccatatggaagaactgagcgtccagttgacggttctcaacgttatgccagagcgatttttcggcgtcgtattgaatactgttataagcctgcggcgtcattgtcgccagcgtgtcaggtaacggacgaggcgcaccacgccacgctgtttgcgctaagtcgtgcgccattgactgtagaatggagaagtcaaaacgctgggtttgcccgtcggcaatatcagaatctgccgcgaatgccgcctgagaaaaaagagaagcaatgccgctggtaccgcacacggcggccatagccattgaacctttaataaatcgtctacgatccatacctgaaagtgagtccttctggtgttgtgaatggtcccgcgctggtcgttttcagcggcaagaaagtgcttatttatgaccgctcactctagacaatatttattaataatccaattgttgaactgagagaatatgcataaatcggcattttttttatgtcgatgggatgagcctgattcgtttgtaaaatcaggcaaatttttgcaaaggcggatggtcagaatttaaagcaaaccacagcgacgtttactgcgttcttccgcttcctagtaaagctggaactcatccaaaaccggacaacccaacgcctgctcaaatgcttcgcgactggcattaccgtgactgcgtgtctgcgtttcattacccagatttgactggaagatccccgccgcgctaacgggcaagaaatcttcataggtgatgggttgcgccactacccaaccacgttcaattaagggctgtggatcgtctccaggatgaatcgcctgacgatgcgcctcacccgaaggcgtcagacggtaccggaaccatgccaacccttgctgacgcattaaaaactcactgtcaggaaaagtgcggaaggtttcctgtaaatgcatttggtgagtgagattatcctgcccggttccagcgttacgcagaagatcatcatacagttgtcgccctttcggcgttaatgccacgccacgctgctcaatttcaccaaagcgcgcggtatgcgtgccctgtttctgccccgcaaacaacaccgtctcttccagtgctttaaagctggtctggcgtagtaaaatcggtacctcgcggcgcggcggcccctcgatgagaattttgggttcaattccgcattcaggcatcatcgactgcacccggtcaatatccagcgtacgtggcgtcaggtggttgatatggcatccaggaaaacagaccacatcagcaatcaaccgatgttcgttgtgcaaggcgcgataggtttcttcatctaccgttgctgactggtgccagcgaaacgtttccagggcttcctgcacaaactcctgtgcctgtgtttcgttaaaaccgccctgctgctcatattcctctaacagttgtcgacaacgtggggtgaagatatcgcgctgacgcagaatctccgccgctttctggcgcaaaatttcgttctcgataagctcaaggcggagtaaggaggtaaaaacgcggaagggattacgcgccagagaagcatcatcaatgggccgaaatgctgtcgaatgtaccggcacccctgcctgcgagagatcgtaatagctcaccgggtacatccccataatggcaaacatccgccgaagagtagcaagctcttgtgcagtcccaacgcgaatcgccccatgacgttcaacattcagtcgcgccagctcgtctgcatttaccattttttcgtgcagttgaggattgttttccagcacagccagattcacatcagctaccagttccagcagcgtgccatattgcggaacttcttgctggtacatggctgacattgcctgcgaaaactgttcccgaatctcatccgccgtgatgctgttcgccatagtgtctgcctccagtggtcagtaatctggagtgtaggtaaccgcattcactctggcgggaagaatttacaaactgtgatctcgccgcgaaaacatcaatattatccattttgctgtaacataattgctttaattgttaataatagtttgcaatcaagttatcataatcaaacaacttcacttgtcagcgacaccgcttcgtttttaacatcgcttatggaaaaaaatagtctgtttagtcagcgcatccgtttgcgccaccttcatacattcgtagctgtcgcacaacaaggaactttggggcgcgcggctgaaacccttaatttgagtcaacctgcgctctctaagacattgaatgaactggagcagctgacgggcgctcgcttgtttgagcgtggtcgtcagggggcgcaacttaccttacccggcgaacaatttttaacgcatgcagtcagagttcttgacgccatcaacactgccggacagtcgcttcatcgtaaagaaggtcttaataatgatgtcgtcagggttggtgcactacctactgcggcactggggatattaccttcggttataggtcagtttcatcagcaacaaaaagagacgaccttgcaagttgcgacaatgagtaaccctatgattctggcgggtttaaaaaccggggaaatcgatatcggcattggtcggatgtcagatcctgaactgatgaccgggcttaattacgaactgctgtttcttgaatcgctgaagctggttgtccgccctaatcacccgctacttcaggagaacgtaacgctaagccgggtgctggaatggccggtcgttgtatcaccagaaggcactgcgccacgccagcattcagatgcattagtgcagagccagggctgtaaaattccttcgggttgtatcgaaacgctgtctgcttcgctatctcgtcaacttacggttgaatacgattacgtgtggtttgtcccttctggcgctgtaaaagacgacctgcgtcatgccacgctggtggccctgcctgttccgggacatggtgcaggcgaaccgattggaatactgacccgcgtagatgcgacgttctcttctggttgccagttgatgattaacgctattcgaaaatcaatgccgttctgaaaggtgaagggatctgtcgatccctccttgaacattttcacaccgtagcgaaactaactggttcacccgctccgcgaggttctgccgacacagaatgtttgtgcagacggaatacatccaccgcctcagttaatcgtgccgcctgttcttcaagggacaccgccgccgctgaggcctcttctaccagagaagcattctgttgcgtcaccttatccatttcagaaatcgcctggctaacctgcgttatgcctctactttgttcatccgaggcggcggcgatttcctgcatgatatgtgtgacactcgcgacggcatcaacaatagtgctcatggttttcccggccgttgccacctcatccgaccccaggtcaattaacctgactgattcactgatcaagccttcaatctctttcgccgcctgagcgctgcgacttgcgagtgtccgtacttcgctggcgacaacggcaaatccacgcccttgctcacccgctcgcgcggcttcaacggcagcattcagtgccagaatattcgtctggaaagcaatactgttgatgacggcggtgatctcagaaattttcttcgaactcgtggagatagcgcccatcgtttttactacaccggaaaccgtctgcccgccatcgctggctttaatagaagcctcttgcgccagtttgctggcatgatgcgcgttatccgcattctgtttcaccgtcgcagtgagttgctccatgctggcggcagtttgttcgatagccgccgcttgttcttcggtgcgagatgacaggtccgcattgccagctgaaatttcgctggtgccacgataaatctcttccgcaccctgtcgaacagtccctactgtcatccccagtgaatgctgcatttgctgtaaatgacgatttaagcgaccgatttcattacgacccgccggttcatccttcatcgtcagatcgccactagcgattttttcaatccgttgtgcggcatgttgcagtggacgaatgacgatccgacgtagcaccataaatgttatcagcgtcatgaccagggcaagcacaaacgcgccaatcatgaacatcccacccaagcgggtgcgctgatgggccagttccgccagttggttggctctggtgctacgtatcttaacggctttgttcaaaatatcggtataagcattatccagcggtcggatctgctcactttcatgattgataatcgcttcaaacatgccatttttggcatatttcaacataggttgcatacccgtgatataagcctgaaagcgttgatttaattcagtgtcgagggcttcatcagcaggtgttttcaccggccgattctgataagcacgatacccttgctgcgactgtttaatctccgattcggcttgcgcaatatttcgcttcattgcttccatttccgcaatacaactcgcagccccggcctgaatcatattgatccgggctgaacgcaaaaaatctgaactgttcgctaacccggtccgaatctcaatctccgcagtaacatcacgctgatcgcgatcggcctgccagaggaaatagccagccagagcagaacttaatgcgaatagaactaagataccgccaagaatgcaggcaaataacggaaccagcctgatgtgatgcaaaaaacctaatcgctgtgagggagttgtattcattaccgttgtctctcgtccaggtttactcctgatagaaagtcatcggcacttgacggtaattacttatgaccaaaaacctctttgcgtcacatttttacaacaattattgcagagaaaattaatgctattggaatgaagagagtaacgaatggctaaactggctaacccgaatgacgaaaaattctggaaaacagcacgcaatttcgtgaagtgattattttcgtccctaaggaaacctcataggatgcctgcgggtgcctgagactttctgttttcaggctaaccgggaatcagaaagacgaaggccccgaccgatatttctatcaaccgaggccaacgaatgaacctagcaattcagatcttagcctcttacccgccatccggcaaggagaaaggctatgaagcacaaccctctggtagtgtgtctgctcattatctgcattacgattctgacattcacactcctgacccgacaaacgctctacgaactgcggttccgggacggtgataaggaggttgctgcgctcatggcctgcacgtccaggtaagggcaagcgcggggattttccccgcgcatctgactagcagattcattttctcatggcaccccttttacacttcagttagtgcatgtttttttcgatgcactaatagaaccatcattacagacaaatttgccgcctgccgtacagtgtgagatcccccctttcgaaccagaacagggtttgcgcccggcatcggcataaaaggaaacaagcgttcccataaacaaaataagtgccagttttttcatataacctccatggtttatcgaatcttatgttcgatttgaacgttatacgctggtttattttgataccgttgatgagatcaaagatcgggtgaattgattaaaaataagccagatggacgtatgggcaaggattatggttttatttgtcatacaaataaatataataggcgcttccgatgtagacccgtattcttcgcctgtaccacgggtcggttttagtacaggcattttcttgaaatatccttcaggaacgtttacgcggcatcatgcgtagaagtgtgttgtccttccagaaatagtggtgtgccagtgcagccgcagcgtgcaacccgatgacaaaatatcccagattcgccagcgtctcatgccacgactttaagctatcaacccgttcgaaattggcctctgaagcgtaaggcatcgtcaaaccaaacgcaaaccacgggttgccccggttatacatcatcaccaaaccaatcactggcagcgcaataaacaggagatacatcaccaaatgtcccaaatgcgccagtcccgtcatcatcggttttggcttaggtataatcggcggggttgggtatttcagccttaacaaaagacgaacgaccatcagcacgagaattgagatgccgcaggaaacatgaatcatgttgatgagtggccgatcgctacgtgggaagaaaccacgaaactccattgcgcaatacgctgcgataaccagcaaaaagaccagccagtgaatgctgatttgtaaccttgagtatttattttccataacatttcctgctttaacataattttccgttaacataacgggcttttctcaaaatttcattaaatattgttcacccgttttcagtacgttacgtttcactgtaagaatggagattgcccatcccacaatcctggtctaagcctggaaaggatcaattttcatccgaatgttcctgacaggagaaaaccatgagtaaagttggtattaacggttttggtcgtatcggtcgactggtgttgcgtcgattacttgaagtcaaaagcaacatagacgttgtcgctattaatgatctcacttccccaaaaattctcgcctacctgctgaaacatgattcaaactacggaccattcccctggagcgttgattttacggaagattcacttatcgttgatgggaaaagtatcgcggtttacgccgaaaaagaggctaaaaatattccgtggaaagcgaaaggtgcagaaatcattgtcgaatgtactggcttttatacctccgccgagaaatcgcaggcacatcttgatgctggtgcgaagaaggtgttgatttccgcccctgccggtgaaatgaaaactatcgtttataacgtcaatgacgacactctggatggcaacgacaccattgtttccgtggcgtcatgcaccactaactgtcttgcgccgatggccaaagccttgcatgacagtttcgggatagaagtcggcacgatgacgaccattcatgcctatactggcacccagtcactggtggatggcccacgtggtaaagatttacgtgcttcacgcgcagcggcagaaaatatcattccccacactacgggggcggcaaaagccattggtctggtgatcccggaactgagcggcaaactgaaaggtcatgcgcaacgcgtgccggtgaaaacaggttcggtcactgaactggtatcgattctcggaaaaaaagtgactgccgaagaggtgaataacgcacttaaacaagcaaccaccaataacgagtcatttggttataccgatgaagaaatagtctctgaggtgtactggcaatagcggacactaccatttgttctttttttaagcagccatctgatgatatttttccctgaaggctgccggggagatattccccagacgagagtgacgacgctgacgattgtagaaaatctcaatgtattcccgtattactgagatggcttcatcccggttattaaaacgatagtggctcaggctctcatttttcagcgttccccagaagctttccatcggagcgttgtcgtaacagttacctttacgcgacattgatgttttcagaccagactgctcctgtatgacccggtaatcgtatgcgcagtactgtgaacctcgatcagagtggtggattagcccggcaggtgggcgctggctcctgagcgccataaacagggctttacctgtcagctcttttgtcatgcgctctcccatggcgtagccgacaatttcgcacgtataaacatctttgatgccagcgaggtacaaccatccctcctgtgtggcaacatacgtcaggtccgccacccagacctgatttggtgctgtaggagtgaacgtctggttcagcagatttggcgcaactggcagattgtggttcgagttcgtagtcgctctgaacttgcgtttctgcttacagcgtagccttagctccttacgaagacgtgccagtcggtcacgaccaacgatgatgccattctctgccagctccgtctggagccgccgggttccatatgtttcgcgagtgcggatatgtgccaccttaatctccagttttagccgctcatcactttgttttctgtctgagggttcatgctgtacccagttgtaataaccgctcctggatacaccaaatacctgacacatcgcttcaatgggaaattgttgtcgccattgttcgattaacgcgtatttttcagcgactcctgtgcaaaatacgctgttgctttttttaatatatctcgctcaaggcgagcttcatttaacgccttacgcagttgcagaatttcagattccagttcagccaccgtgcgggaaccaggagtaccgagcccttttctggcggcggtaacccattgtcctaaagtgccttcaggaagagataatcgggaagcgccttcactgatcgaaagttgattttcaagaaccgttctgacagcttcggctttgaactctttagagtaacgttgggtttttctgctcattattagctccttctgatgccattctatttcaggaaggagtgtccgttaaactcaggctacctcactcttccgatatcattggcagccatttcggttcggtgtttgatgccacgcaaacggaaattaccgccgtgggcgatttacaactggtgaaaacggtcgcctggtacgataacgaatatggcttcgtcacgcagcttattcgcaccctcgaaaaattcgctaaactctgacgcgcacaggcggaggaaaaaacctccgcctcttttactcattacgactgtaaataaaccacctgggtctgcagatattcatgcaggccatgtttaccatctgcgccgccaataccggatttacgccatccggcgtggaagccttgcatagcttcgaagttttcacggttgatgtaagtttcaccaaacttcagccctttaatggctttcatcgcgacgttcagattttgggtatagattgatgaggtcaggccgtaatcactgtcattagccattgagatagcctcttccagcgtgtcaaatgcgaccaccggcagaaccgggccaaaggtttcctcatgcataatcgacatttcctggcgaacatccagcagcaatgtcggcggataataatatcctttcccctctaccgctttgccacccaacgccactctcgccccttcttctactgcgcgcgccactttttgctcaaccctttccagcgccgcggcgttaatcaacggccccatcgcaatgtcgttgcgttcagcggggttaccaaatttaaccgcctgcatcgcttcacccagccgattgacgaactgatcaatggctacggtccccgcgggcgagattttatcgttcacgttgattttccggcagaagtcatccatgcatggcaaacgctgaaacatgatgcggtgctcagcgaggcgatggaaagtcgctcgttacgttaaaaattgcccgtttgtgaaccacttgtttgcaaacgggcatgactcctgacttttatttctgccttttattccttttacacttgtttttatgaagcccttcacagaattgtcctttcccgatgccgtctctctgatgattgatgttaattaacaatatattcaccgaaaacaaacatataaatcacaggagtcgcccatgtcagtacccgttcaacatcctatgtatatcgatggacagtttgttacctggcgtggagacgcatggattgatgtggtaaaccctgctacagaggctgtcatttcccgtatacccgatggtcaggccgaggatgcccgtaaggcaatcgatgcagcagaacgtgcacaaccagaatgggaagcgttgcctgctattgaacgcgccagttggttgcgcaaaatctccgccgggatccgcgaacgcgccagtgaaatcagtgcgctgattgttgaagaagggggcaagatccagcagctggctgaagtcgaagtggcttttactgccgactatatcgattacatggcggagtgggcacggcgttacgagggcgagattattcaaagcgatcgtccaggagaaaatattcttctgtttaaacgtgcgcttggtgtgactaccggcattctgccgtggaacttcccgttcttcctcattgcccgcaaaatggctcccgctcttttgaccggtaataccatcgtcattaaacccagtgaatttacgccaaacaatgcgattgcattcgccaaaatcgtcgatgaaataggccttccgcgcggcgtgtttaaccttgtactggggcgtggtgaaaccgttgggcaagaactggcgggtaacccaaaggtcgcaatggtcagtatgacaggcagcgtctctgcaggtgagaagatcatggcgactgcggcgaaaaacatcaccaaagtgtgtctggaattgggtggtaaagcaccagctatcgtaatggacgatgccgatcttgaactggcagtcaaagccatcattgattcacgcgtcattaatagtgggcaagtgtgtaactgtgcagaacgtgtttatgtacagaaaggcatttatgaggtgtactggcaatagcggacactaccatttgttctttttttaagcagccatctgatgatatttttccctgaaggctgccggggagatattccccagacgagagtgacgacgctgacgattgtagaaaatctcaatgtattcccgtattactgagatggcttcatcccggttattaaaacgatagtggctcaggctctcatttttcagcgttccccagaagctttccatcggagcgttgtcgtaacagttacctttacgcgacattgatgttttcagaccagactgctcctgtatgacccggtaatcgtatgcgcagtactgtgaacctcgatcagagtggtggattagcccggcaggtgggcgctggctcctgagcgccataaacagggctttacctgtcagctcttttgtcatgcgctctcccatggcgtagccgacaatttcgcacgtataaacatctttgatgccagcgaggtacaaccatccctcctgtgtggcaacatacgtcaggtccgccacccagacctgatttggtgctgtaggagcgaacgtctggttcagcagatttggcgcaactggcagattgtggttcgagttcgtagtcgctctgaacttgcgtttctgcttacagcgtagccttagctccttacgaagacgtgccagtcggtcacgaccaacgatgatgccattctctgccagctccgtctggagccgccgggttccatatgtttcgcgagtgcggatatgtgccaccttaatctccagttttagccgctcatcactttgttttctgtctgagggttcatgctgtacccagttgtaataaccgctcctggatacaccaaatacctgacacatcgcttcaatgggaaattgttgtcgccattgttcgattaacgcgtatttttcagcgactcctgtgcaaaatacgctgttgctttttttaatatatctcgctcaaggcgagcttcatttaacgccttacgcagttgcagaatttcagattccagttcagccaccgtgcgggaaccaggagtaccgagcccttttctggcggcggtaacccattgtcctaaagtgccttcaggaagagataatcgggaagcgccttcactgatcgaaagttgattttcaagaaccgttctgacagcttcggctttgaactctttagagtaacgttgggtttttctgctcattattagctccttctgatgccattctatttcaggaaggagtgtccgttaaactcaggctacctcacatcgctatcatcgcgtaaacgcggcagctcgccagtgagtagtgagagataacgctcaaccggccataatccttgtaactgattaataaagattacactgtctgcgttatttcctaactgaggaacgaatccgggataacttaaccagcgtggtgcatcgggattgtccccagtcatacggcggaacgtcgccatcgtgcgccgctgcatggtggggtcctgaacaacgatagccgtatgaactcgttctacggcctgattcaatagcgcgatgctaaagcgtgcgttttcaccgcagtttgttgactggtcttcaatccagattttttcatgcggaatgtgccagaactgatgagcgatatccgcctggatggtcgcttctgctctgccagtggtgcggatagtgttgtagtgcggatgctgtgcgatggcgctatacaaaaaagttgtcgagtgaccgataccaccactaatcagtaaaggaatttgctgatcgcgagcaatcttacatgccgcgtcgatagtcggcataaccgcattgcctgcaaggatcacgcaatcggcctgatacggcacctcaccggagaaatcatcctgcgccagccactgtccgataacatttatggcatctatagttgccggcgaaagcgtcggaaacggggtaatgttcatggttcctccttatcgttcccttaagaatactgcgtgagataatagtgagaagcggagcactctgaaaggaggaagtcgtatttccttaaccgccactccgcaagcctgacatatcttttaaggaaatgctgtagataaacattattcatcttgcagcagagaattgtatttttctgaattcctgaatttttacccttaccgttttagaattaataaaaaacccggcgctaaatgcttaccgggttttttctttatcaggcaaatagcagggttaaccgctaatctgctccatcgcctgcaaaatacgcttatctgaaatcggataaggcgtaccaagttgttgagcgaagtaactaacacgcaactcttctatcatccaacggatctctttcacgtcttcatcctcacgacgtgcaggcggcagtttgttgatccattgctgccacgcctgctggacgttttcgactttcagcatctgagcacggtcgcgatgtggatcaaccgccagtttttccagccgtttttcaatcgcctgcaaatatcgcagcgtgtcgcccagccgtttgaagccgttaccagtgacaaaaccgcgatataccagcccgcccatctgcgctttaatgtcagaaagccccagcgccatcgtcatatccacccgccccttcagacgtttgttgatattgaacactgccgtaaggatttgctcgacctgcttcgcaatatccaccaccgtgtcgttcagttcggcacgcactttttcatgcagcgcagcaaagccttcttccgtccagaccgggccaccattggcgtcgatcaatttatccacaccgcaggagatacaatcgtcgatcagctccagcactttgccatacgggttaaagtacagccccagcttggctttgtttggtaacttctcatgtaaatacttgatcggcgagggaatattcagcagcagtagacggcgaagaccgttccacattacctgtttttgctccagcggattatcaaacagtttgatcgccacactgtcgcgttcatccactagcgctggccacgccttcactttgtagttgccacgcttctgttcgtagctttccggcagctgaccaaaactccagatatgcagtccgctctgctcgataccgtcatccgccaccgcagacagcgtttcctgcactttgcctttcagcgcatctttcagatcttgtagcgagcgcccttcttttagcttcttgtttttgtcatccaccacgcggaaggtgattttcaggtgatcgggcacctgatcccagtgccagtcttcgcggtcaacggtaacgccggtcatccgccgtaactcgcgctcaaggctgtcgagcaacggtaactccagcggtgtgacgcggcctaaaaacgcttcggcgtagtttggtgcaggcacaaaattacggcgtaccggtttcggcaacgatttaatcagagcaatcaccaattcgcggcgcagaccggggatctgccattcaaacccgctttcctcaacctggttaagtaacggcagcggaatatgtacggtcacaccgtccgcgtccgcgcctggctcaaactgatagctcaaacgcagcttgagattgccctgatgccagaagttcgggtaatccagctttctgattttttccgccccttctttgatcaacatgctcttttcaaagttgagcaaatcaggcgtttcgcggctgacttttttccaccagctatcgaagtgacgagcggagattacatcgtggctgatgcgctggtcgtagaactcaaacagcgtttcgtcatcaaccagaatatcgcggcgacgtgatttgtgttccagctcttccacttcggcccgcagtttcaggttttcacggaagaatgcgtgacgcgtctgccagtcaccttccaccagagcgtggcgaataaagagttcacgacataacgccgaatcgatctggctgtagttgaccttgcgcgcagcaacaatcggcaaaccataaacagtgactttttccgttgccatcaccgcgccctgcgcccgttcccagtgcggttcgctgtaggtgcgtttaatcaaatgctgagcaacgggttctacccattccgggtcgatacgcgcagcaatgcgcccccacaggcggctggtttctaccagttccgccaccattacccatttcggcggctttttgaataaaccagaaccggggaagatggagaaacgcgcgttacgtgcaccggtatattcctgtttatcggcatctttcatgccgatatgggaaagcaaaccggtcagtaaggcgatgtgaatttcacgatactccgccggttcgctgttgaccggaatgccaagttctttcaccacctggcgcaactgggtgtagatatcctgccattcgcgcacgcgcagatagttgaggtaatcggtacgacacaggcgacggaaggcgttggaagaaagcgccttttgctgctcgccaagataattccacagatttacaaacgcgaggaagtcggattctttgtcgtggaagcgacgatgtttttcgtccgatgcctgctgtttgtccatcggacgttcgcgcggatcctgaatggagagcgcggacgtgataatcatcgcctcacgcacgcagccatgtttttgcgcttccagcaccatacgcgccagacgtgggtcgacaggcaactgcgagagctggcgaccgagcggcgtcagtttataggcgctggcctgttcatccgtggtgatcgcgcccagttcttcgagcagacgcacgccatcctggatattgcgtttatccggtgcttcgacaaacgggaacgcagcgatatcgcccagccccagcgcggtcatctgcaaaataaccgaggccaggttggtacgcagaatctccggatcggtaaactccgggcgcgagaggaaatcgtcttcggaatagagacgaatacagatcccttcggacacacgaccacagcggcctttacgctgattggcagacgcctgcgaaatgggttcaatcggcaaacgctgcactttggtgcgatagctgtagcggctgatacgcgctgtaccggggtcgatgacgtatttaatccccggtacggtcagcgaggtttccgcgacgttggtcgccagcacaatgcgccgtccgctgtgcgactggaacacgcggttctgttcgctgttcgaaagccgcgcataaagcggcaagatttcggtatggcgtaagttcagcttgttcagcgcatcggcggtatcgcgaatttcccgctcaccactcataaagatcagaatgtcgccagggctttcctgactcagttcgtctacggcgtcaaaaatcgcctgcaactgatcgcgctcggtgtcatcggcttcttcaacaatcggtcgatagcgcacttccaccggataggtccgaccggagacttcgataatcggcgcattattaaagtggcgcgaaaagcgttccgggtcgatagtcgcggaagtgataatgatttttaggtcaggacgccgcggcagcaactctttcaaatagccgagcagaaaatcgatattcaggctgcgttcgtgcgcttcgtcaataatgatggtgtcgtactgcatcagcaggcggtcttgctggatctccgccagcaggataccgtcggtcatcagcttgaccatcgtgttatcacttacgtgatcgctgaaacgcactttgtaaccgatgcaaccgcccggctccgttttcagctcttccgcaatacggttcgccaccgttcttgccgccaggcgacgcggctgggtatggccgatcagccctttaatcccgcgccccagctccatacagattttcggtaactgagtcgttttaccagaacccgtttccccggcgacgatcaccacctggtgatcacgaatcgcttcgagaatgtcctgttttttctgactaaccggtaaattgtcaggataagtaatttccggtcgtgccgcttcacgcagcaggactttccctgccgcctggtcaatctctttcgccatctcctggaaaatggcctgttgtgcatcaggatttttaaccttcttcacgccgtgcagacggcgagaaaaacgcagtctgtcacgcagcatcagcgaatccagccgctgctgcaaggccgtaaaggtcaatttttgttgttctgtcataacgttagtgggcagtagtctgcctgattaattttctttgaaatgatagatatagagtaccacatcacggctttctatgcgttgttcaataaattcgaacataggcttcgatttattgcgctatctctgtggcaggattgtgaataaagtgtcaacaagcaacggggcatcgcccattcaaacatctataaggaaacaccatgagcaaggtattagttcttaaatccagcatcctggcagggtactctcagtctaatcagttgtccgattattttgttgaacaatggcgcgaaaagcactccgctgatgaaatcaccgttcgcgacctggctgcaaatccgattccggtactggatggcgaactggttggtgcactgcgtccgagcgatgcgccgctgactccgcgtcagcaggaagctctggcgctttccgatgagctgattgccgagctgaaagcccacgacgttatcgttattgcggcaccgatgtataacttcaacatctcaactcagttgaaaaactattttgacctggttgcacgcgcaggcgttactttccgctataccgagaacggtccggaaggtctggtaacgggtaaaaaagccatcgttattaccagccgcggtgggatccacaaagatggaccaacggacctggtgacgccgtatctgtccacgttcctcggctttatcggcattactgatgtgaaatttgtcttcgccgaagggatcgcatacggtccggaaatggcagcgaaagcgcagtctgacgcgaaagcagccatcgacagcattgttgctgcataaccggacacgatcttgatgtggactgtagtccagtccacatcccaatccacttacctgttttcccataatttcagcatcgctttgtgatcttccttaagcacaatatgcgagcgtctggctcgaataaagctaatcgcttcatcaacggttttacagtatccgtaacataacagccatgccgccactaccagcgcactgcgcgataatcccagtgcgcaatggaccagaacgctgccttgctcttcgcgtaatgtttccagcatcgccacggcctgtcggagctccccctcttccggaaccaccagatctagcatcggtacacagaaatagagtcgatcttttgtcgctcgtccacgagggaattcaaaggtgacgtccagaaccgcattctgtgccggaatatgtcgtggaaacgcccctaaataaacaccagcagtcattttgctcaccggctccaggcgacgacaaaaccaacgcatagatagccacatcccgatgcgccagggcaatgtcagccagtaaacggcgggcgggagtttcccctgactatctttccctgttgttatcgcgccaagcccaccgtacccacggccaataatgagtagcgataatactggccaacataaccagactgaccaccataactgaaccatcatcattagctccatcaacacaatgcacgcgcacgcgcctacgacatatggcagtgctattttgattcgacgttgatcaggtttctgataattccaccgacggtcgacgggcaccatccagtcaatcaacatacctaccgccagccctgtgatgacatcaataaaatgatgctgccatgtcgtcagcgtcgaaatggcgatgagtaaaaaccatccgccgcagactttacgccacctcacagccagatgctgacgaaagtgacgccaaagtagccagcagagaataatatgcagcgaaggagactggttataaggcagatcaaacagttcaagttgcgaaaatagccatcccgtcaccccactcacttcaggacggataaaactaaacttcagcggatagagcaaaaaaccgcagcaggccattaccgttgccagaataagccggtggacaagtcggcgctgttcgaatgtcgtgctacaaacgaacagcgaaaatccatataaaagatccagactccagtaaggaacaatagtccagggaagaaaagggatcgccgtttcccaaccgaatacctgactgggaatatcatggctattactgtcctgaaccgcggtgaactgattaagagatccataggtgaagaagaaaaacggggccagcaacaataaccagccagctccttgtagcaatacgttccggcgttcagttatcacgacgcaccgccatcgaaaccgtaaaaatgccccactcatcaatccgttgtgtgcatttatcaaatccagcatcatgcacgagcaaatccatctccccttgcgtacgcacgcgcattacccacagtttaccatctttatgactggttaacaccccggcaatcagctccagttgtgggtgccacggctgcccggtgtagatgagaatgccacccggttcgatggcattggcaagacctgcgagtgagttttttacctgctcattttcgggaaacagctcatacagtccagagacaatcgccagcgtaggccgcggagttaacgcgctgagttcctccgggttaaacgcatcgccctgttcaaaacgcacccgcccagacattccccgttgggcaatcatctcttgcccctgtgcaacatttaactcactgtaatcacgtaataaaatatcgcttacggcaggctcgtttgccagtgcatccagtacatagcgcccatgccctgcggcaatgtcaaccacgcggacggctaaacctttgacgtggagatcggcaacggcttgtttaatcagtatttgtaaatgagttttgcgctggcgaataccgcgccagccaacactgttcaggtagattttgtcgattaagcgcccgaatgcgttactgccttgcggttgattttgatagacataatccagcgaactgcctgaatcaaagccagtgctcattccgagatgcaggcccgcagagtgcgtcccgaacaatttcatcgctttacgcataaagcgatacgccaaatcaaccggcgataatggcacgggtccacctgaaaggaggcgccagcgatccgctgatggtccagtgcggtcttcatgctgataatcaaatttttgtgacttgttagcatataaacgacgaataaagctttgcattttttcaaatgcctgcgccctgttctcttcacccaacgtgtcgtgataaaagcctggcagcagatgcagctctttcagagggctacgtaatctctgataaaaatcaatctgcggttggcgatgcaccacatagtcatcgcctgatatcagaagttgcgtggggagcgtaatcgccgccgcatctctaataatacgttcagacgttttatagagatcgagcaagatattgacggcaatcgcccgtgtgatcagcggatcattattgaaactcgccacccgttgccgatcgtgggtcaaatagcgtcttttcacataggaattaataaaaaacagaccacgcagacgatgccatagcgtcagcgcaggacgtgccagcggcacatacaatttaaccttaaaggccggagaagccagcaccagcccgcgaattgcaggcgcataatcatgaacccatgtggcaaccagcactgcgccgacgctttgcgcgatcacaaccacctcttccagtccaacctggctgtcgctggcagcaaaacggacaaattcatcgacatcctgcactgaacgcgcaagagatgggctataaccacgcggccccgaagtttttccatgcccccgggcatcccatgcataaaaagcagtatctggcatcgccagttcatcaacgatatgttgtagacgaccagaatgttcatggccacgatgaaataagacgatgacctttttcgcccctggctgtaaagcgggccagtgccgataaaacaacgctgtattatcactggtggtaaaaaaatgttccccagagatgcgtgaattttccattttctctattttccttcagtaacagcagtaacgaataaaataaaaaaataccggagcggtgaaaattaatgagtcaatcctgtcaaggattccgccatgtccaggtaatagtttcccgctatctttaacaccaacatctcgtttgatggctgacatcactacatcgccgcaaaaaccactaataccaattaacaaacccgctaatattgcctgtaatgtatttagcggtgtcagtaacggtccaatgatcatcgacgctatcatggtggtgattacgccgccgaccagaccttccagcgtttttcccgggctgactttggggaccacttttcttctgccgcaggatttcccccataaatactgtgcaatatcgtttgacgcggttaatgccaaaagaaataacaccagtaaggccccgccctggatattcatggatggcaacattaataaccaggcggcatgactcaaggcgaaaacggtcattatccagccccaaaaaatggcgctcacggtatgcagaaaaccggaggggtcacccacaaaaactcgccaggtggctaatatcagaaacccagccaaaggtataaataacagaaacagctcaaagcaattaaaaccgataagcaaatagttaagaggaataacccaatataaccaccgcggaaaatgtacggatataagcatacaatattctttcaatgccagaaaacttatcagcgcaaaaaacgccaacgtcatccagcgtggacctgaaatcaccagtgaaaaacaaatgacgatgccccaccaggtacgaatacgtaatgtaacctcacccccttttctctccggtaaccgccatagcagaaaacggtttatcagcgttgctaaaattaacaacgcgaaaagtgaggtgtactggcaatagcggacactaccatttgttctttttttaagcagccatctgatgatatttttccctgaaggctgccggggagatattccccagacgagagtgacgacgctgacgattgtagaaaatctcaatgtattcccgtattactgagatggcttcatcccggttattaaaacgatagtggctcaggctctcatttttcagcgttccccagaagctttccatcggagcgttgtcgtaacagttacctttacgcgacattgatgttttcagaccagactgctcctgtatgacccggtaatcgtatgcgcagtactgtgaacctcgatcagagtggtggattagcccggcaggtgggcgctggctcctgagcgccataaacagggctttacctgtcagctcttttgtcatgcgctctcccatggcgtagccgacaatttcgcacgtataaacatctttgatgccagcgaggtacaaccatccctcctgtgtggcaacatacgtcaggtccgccacccagacctgatttggtgctgtaggagcgaacgtctggttcagcagatttggcgcaactggcagattgtggttcgagttcgtagtcgctctgaacttgcgtttctgcttacagcgtagccttagctccttacgaagacgtgccagtcggtcacgaccaacgatgatgccattctctgccagctccgtctggagccgccgggttccatatgtttcgcgagtgcggatatgtgccaccttaatctccagttttagccgctcatcactttgttttctgtctgagggttcatgctgtacccagttgtaataaccgctcctggatacaccaaatacctgacacatcgcttcaatgggaaattgttgtcgccattgttcgattaacgcgtatttttcagcgactcctgtgcaaaatacgctgttgctttttttaatatatctcgctcaaggcgagcttcatttaacgccttacgcagttgcagaatttcagattccagttcagccaccgtgcgggaaccaggagtaccgagcccttttctggcggcggtaacccattgtcctaaagtgccttcaggaagagataatcgggaagcgccttcactgatcgaaagttgattttcaagaaccgttctgacagcttcagctttgaactctttagagtaacgttgggtttttctgctcattattagctccttctgatgccattctatttcaggaaggagtgtccgttaaactcaggctacctcacctggcaggaagtaaaaggcagcgacgatgcctggttttacaccgtttttcagcttagtggtcaggcaataatggagcaggatgagcgtcaggtgcagattggcgctggcgatattacgttactcgatgcctcacgcccctgttcgctttactggcaggagtcttctaaacagatttcattacttttgccacgcactctgctggaacaatattttccccatcaaaaacctgtctgcgcagaaagactggacgctgacttacccatggtgcaactcagtcatcgcctgttacaggagagcatgaataatccggcactttctgaaacagaaagtgaagctgcgctacaggcgatggtgtgtctgctgcgcccggtacttcatcagcgggaatctgttcaacctcgccgtgaacgtcagtttcaaaaagtggttacgttgatagacgataatattcgcgaagagatattacgcccggagtggatagccggagagacaggtatgtcagtacgtagtttgtaccgaatgtttgccgataaaggtttggtagtcgcgcaatatatttagactggccccctgaatctccagacaaccagtatcacttaaataagtgatagtcttaatactagtttttagactagtcattggagtacagatgattgatgtcttagggccggagaaacgcagacggcgtaccacacaggaaaagatcgcaattgttcagcagagctttgaaccggggatgacggtctccctcgttgcccggcaacatggtgtagcagccagccagttatttctctggcgtaagcaataccaggaaggaagtcttactgctgtcgccgccggagaacaggttgttcctgcctctgaacttgctgccgccatgaagcagattaaagaactccagcgcctgctcggcaagaaaacgatggaaaatgaactcctcaaagaagccgttgaatatggacgggcaaaaaagtggatagcgcacgcgcccttattgcccggggatggggagtaagcttagtcagccgttgtctccgggtgtcgcgtgcgcagttgcacgtcattctcagacgaaccgatgactggatggatggccgccgcagtcgtcacactgatgatacggatgtgcttctccgtatacaccatgttatcggagagctgcccacgtatggttatcgtcgggtatgggcgctgcttcgcagacaggcagaacttgatggtatgcctgcgatcaatgccaaacgtgtttaccggatcatgcgccagaatgcgctgttgcttgagcgaaaacctgctgtaccgccatcgaaacgggcacatacaggcagagtggccgtgaaagaaagcaatcagcgatggtgctctgacgggttcgagttctgctgtgataacggagagagactgcgtgtcacgttcgcgctggactgctgtgatcgtgaggcactgcactgggcggtgactaccggcggcttcaacagtgaaacagtacaggacgtcatgctgggagcggtggaacgccgcttcggcaacgatcttccgtcgtctccagtggagtggctgacggataatggttcatgctaccgggctaatgaaacacgccagttcgcccggatgttgggacttgaaccgaagaacacggcggtgcggagtccggagagtaacggaatagcagagagcttcgtgaaaacgataaagcgtgactacatcagtatcatgcccaaaccagacgggttaacggcagcaaagaaccttgcagaggcgttcgagcattataacgaatggcatccgcatagtgcgctgggttatcgctcgccacgggaatatctgcggcagcgggcttgtaatgggttaagtgataacagatgtctggaaatataggggcaaatccaatattcgtaaccgtcgtctcgatttttgtgcagatgcgattcgccatgccgcagatgatgaaaaactggcaggcatcggctttcattggggattttctgaccagagtcatttttcaacggtatttaagcaacgctttgggatgacgccaggcgagtatcgacgtaaattccgttaactaattcgcgttgtgtgtactgcaacgccaattagttaaaacagatatttgactatgcatttttcagggcaaaaggcaatttgacaggagtttttgaatattcaccttgtttcaggaaaatagatcaatcgctttctcctgtagcgttatcccgatattgcggttttgctattaaaattttcgcacccatttaccgtttatcccttgtacatattcccccggtttggcccgagctacgagcttttgcccggcgagtttcgcgatatcatctaccgacacattattttgctttgccagttgttggtaactcgctttacgttcggcattaatgtcggttactaatttctctgtttcagcatccgttttcagcgcaaccagataaccataaaatgtttcacctacccgcccctgagttctggcttcatccagagtcaatgccattacattgctgcttaccagcccaacaagaaacgcacaaagaagtaatgttttcttcatcatcgcctcagaaaagatcgctacgagtttcaagcagctcttcgacatctttgtctgccttgatgatgatctcatgctcaattttaacgttcatattgatagtgatcggttccttgggcgcagcgacttcaatacgcggcgtacagccaaccagcataaaagatgacgtcaacgcagccagtaaaattttcattgtttttcctcacactcttttccttgcggacagtcatttcccggcagacgtgcgttctgctccaaccatgcctggagattatcgccaaagcgtaaactgcgccacagcgtaaaaatattctcttcatgatggtaattaaggtttaccgtaccgcttttaccatcaacgcgactggtacctgtaatgttggcctgcatggttaataaaccgagattatctaagttaatttttgtcgatgaccggctaatttccatatagcgcaaccagttaattgctgaacccgcagtcatattgtctttcaccaccgcatctgcggtgtctttatccagccgcaaggtcattggcccgctatttgccagccaaccatctttcactatccatttttcgttgtttagccataacggcaatgcaccactaaatgccccggacatggcgaattgtttcggattgacggcgctaaccagttcgctggatgagagattattcagccgcaacagcgccgggtcatgttgcggcatacgtaattgtttcatcagtacgttaccgcctaacacatcgacgctaacatcagtcaacagcaagggttcttcttcagtccacggataacgcccttgcaaatcagccgtaatatttttcgctgtcaccagattaatcacttcggcaattcgcaacgtaacggggccgcgagtccccagatgccaggctccatcggcaaaacggaaaggcaggacaaaatcgacaccgttaacctgattatctggcatccaggcactaccgcctttcaacacgccgtgtcctcccgcgcggaatccttgttcaggcgcagcagaaaatgcaacctgagcatacagttccccatcgcgtaagttcatcttccagtcgggtggcaccagcggctggaatacagtcagtgattgttttggccaccaggcgttaccgcgcagacgaataccgtcccagcgaccatttacccgaaccgggccaatctcaccagcatgtaaatcgcctttaaagaggaaatacgtcggatcgcgcccatcgacgctaaattttaaggttgatggcggtaacacactgccgccagtgaacagcgtttgcccggcgtccagtgacagcgcgccgctgaaggagggatgctgtgcgtcacgtacccagacgacgggcttgtcgagaattaatcgcggcttttctaccgtcatcgtaccgtattgtaactggtcgaaaccggtggagaggtcggtcagcgtaatcgtgctgtcatgccattcaccttttcctgcgacatcccaggtggcatttatcggtgtaaaactgccttttccccagtagcgccactgccagcggcccgcgtcagggagaaaatcattcgccagcccatccatatgcagcacgaaatcgcccagttcatattcatgcgcctgcaaaatggcctgcaaacgtccgtcaacaccacgttgggtgacttttacacccgctaaaggccagcggatttcatcgatgtccagcgaatcgatgactcttcccttcgaacgtaataacgcgcctggctcaaaggccagcgttgggtcagtcagacttccacttagctgcgcgggtaagcgggcatataaaatgaggtccgcctgtttcgcttcaccggtcagctgcagaggcagctggctgttatccatgcttaattttcctgggccaaaatttagcaccgcgttgcctttacccgcttgcccctgggtcagcacactcagtcgtccgctgatcagagcgttctcaagccctgcctgccagttgtcgactttgacacccagtcggccactcaaaggaaaacctgcatacggccaactccagcgaccatcgcttacggtcaattgttgacgagtaatttgccacggcaaatcgagcaacggatcgccgttatcccgtgccagcacaatcaattgcccgctattttcctgccagtccagctctgcatccaccagtgacggttcctgcggcaagtttaacgtcgcagtagcatgcccacttacaggaagtccatccggcacgagcggcatagtaaattcccccaccagtttaaccggcggctgattttcaaacgcgatgacatccagttcgctgactgtaagttgttgccctttcagctggccttgaaatttaactttttcgccctgataacgcagttgctgaatatcagaggttaatgcgagagagagttttccctgccattcctgccagggagaaaaaatcagtttatcgatattgatccaggtgttaggcagcatggactgccactgcgcgagggtttttggagcagctggcgattgctccgtctgcggcaatttcgccagacaagcagaatcaagttctaccatgccgacgttcaataaccagcggctgggatgtgaaaggctggcgttggtgatatgcgcaagctgacaatctcccaccagataacggagatcgggaatgattaaacctttacgcgtaatgcgtgggctttcatctaatgcaatacgtgtcccgagcggtagccagatgcccgccagcgtgggaacccacagcccgagcgtcatcagcagcgtcaacggcacaagaataatcagtaataacagcgcgagaacggctttatatttacccagcatgggtagttaatatcctgatttagcgaaaaattaagcattcaatacgggtattgtggcatgtttaaccgttcagttgaaggttgcgcctacactaagcattgttgttgatgaatttttcaatatcgccatagctttcaattatatttgaaattttgtaaaatatttttagtagcttaaatgtgattcaacatcactggagaaagtcttatgaaactcgccgtttatagcacaaaacagtacgacaagaagtacctgcaacaggtgaacgagtcctttggctttgagctggaattttttgactttctgctgacggaaaaaaccgctaaaactgccaatggctgcgaagcggtatgtattttcgtaaacgatgacggcagccgcccggtgctggaagagctgaaaaagcacggcgttaaatatatcgccctgcgctgtgccggtttcaataacgtcgaccttgacgcggcaaaagaactggggctgaaagtagtccgtgttccagcctatgatccagaggccgttgctgaacacgccatcggtatgatgatgacgctgaaccgccgtattcaccgcgcgtatcagcgtacccgtgacgctaacttctctctggaaggtctgaccggctttactatgtatggcaaaacggcaggcgttatcggtaccggtaaaatcggtgtggcgatgctgcgcattctgaaaggttttggtatgcgtctgctggcgttcgatccgtatccaagtgcagcggcgctggaactcggtgtggagtatgtcgatctgccaaccctgttctctgaatcagacgttatctctctgcactgcccgctgacaccggaaaactaccatctgttgaacgaagccgccttcgatcagatgaaaaatggcgtgatgatcgtcaataccagtcgcggtgcattgattgattctcaggcagcaattgaagcgctgaaaaatcagaaaattgggtcgttgggtatggacgtctatgagaacgaacgcgatctattctttgaagataaatccaacgacgtgatccaggatgacgtattccgtcgcctgtctgcctgccacaacgtgctgtttaccgggcaccaggcattcctgacagcagaagctctgaccagtatttctcagactacgctgcaaaacttaagcaatctggaaaaaggcgaaacctgcccgaacgaactggtttaatcttgccgctcccctgcattccaggggagcttattcagataatccccaaagacctttcatcttctattcttaaaatagccctgagtcagaaactgtaattgagaaccacaatgaagaaagtagccgcgtttgttgcgctaagcctgctgatggcgggatgtgtaagtaatgacaaaattgctgttacgccagaacagctacagcatcatcgctttgtgctggaaagcgtaaacggtaagcccgtgaccagcgataaaaatccgccagaaatcagctttggtgaaaaaatgatgatttccggcagcatgtgtaaccgctttagcggtgaaggcaaactgtctaatggtgaactgacagccaaagggctggcaatgacccgtatgatgtgcgctaacccgcagcttaatgaactcgataacaccattagcgaaatgctgaaagaaggtgcacaagtggatctgaccgcgaaccagttaacgctggcgaccgcgaaacagacattaacttataagctggcggatttaatgaattaatagctgccacagctcccggcggcaagtgactgttcgctacagcgtttgccgttgggtaatgcacacatcccaatcgccgtaccatccagttgacgggcaacagaaagcgaaccgccgatcattgcacaatttgcttctccactactggacatcgacgcttttaaacctggcgctacgtgcgccgcagtcgcctgctgaacaggttcactactacacgccgacaacaataaagcggcacaccctacccaaaacgctgctcgcatctcttcttcctctgatcttcaagccaaacgacaccgccataaataataggcagcacagagggcggcgtcgagagctgtcctgcgcgttgccccgcatttttacttttttatggctatttttttgccctctgtttgatcaaaacattcattacgctgatgtgggggacacaaaagcgaaaatgcagaagaaagccatttgctaaaattgaaggattactactgggcgcgcagcaatttcgtgcgcccctcatttgcgcaatgtaagggtgtcatatgattactattgatggtaatggcgcggttgcttcggtggcgtttcgcaccagtgaagttatcgccatctaccctattacccccagttccacgatggcagaacaggctgatgcctgggccggaaacggcttgaagaacgtttggggagacacaccatgcgtggttgaaatgcagtcggaagcgggtgctatcgctaccgtgcatggcgctttgcagacgggtgccctttcaacatcgtttacgtcatcgcagggtttgctgctgatgatcccgacactgtacaaactggcaggcgaactcacaccgtttgtcctgcatgtagcggcacgtaccgttgccacacatgcactctctatttttggcgatcattccgacgtcatggcggtgcgccagacgggttgcgcgatgttgtgtgcggcaaacgtccaggaagcgcaagactttgctctcatttcgcacatcgcgacgctgaaaagccgcgtgccatttattcatttctttgatggtttccgcacgtcccacgaaatcaacaaaattgtcccgctggccgatgacacgattcttgatctcatgccgcaggccgaaattgatgctcatcgcgcccgggcgctcaacccggaacatccggtgatccgtggtacgtccgccaatcctgacacttatttccagtctcgcgaagccaccaacccctggtacaacgcagtctatgaccatgttgaacaggcgatgaatgatttctctgccgcgacaggtcgtcagtatcagccgtttgaatattacgggcatccgcaagctgaacgggtgattatcctgatgggctcagccattggcacctgtgaagaagtggttgatgaattgctaacccgtggcgaaaaagtcggcgtgctgaaagttcgcctgtaccgccccttctcagccaaacacttgctacaaactctaccgggatccgtacgcagcgtggcggtactggacagaaccaaagaacccggtgcccaggcagaaccgctctatctggatgtgatgaccgcactggcagaagcctttaataatggcaagcgcgaaactctgccccgtgtcattggtgggcgctatggtctttcatccaaagaatttggcccggactgtgtactggcggtatttgccgagctcaacgcggctaaaccgaaagcgcgctttacggttggtatttacgatgatgtaaccaatctgtccctgccgttgccggaaaacacccagccaaactcggcgaaacttgaagccttgttttatggccttggtagtgatggcagcgtttccgcgaccaaaaacaatatcaagattatcggtaattccacgccgtggtacgcacagggctattttgtttacgactccaaaaaagcgggcggcctgacggtttctcaccttcgcgtgagcgaacagccgattcgttccgcttatctcatttcccaggctgattttgttggctgccaccagttgcagtttatcgataaatatcagatggctgagcgtttaaaacctggcggcattttcctgctcaacacgccgtacagcgcagatgaagtgtggtcgcgcttgccgcaagaagttcaggccgtgttaaaccagaaaaaagcgcgcttctatgtgattaacgcggcgaaaatcgcccgcaaatgtggcctggcggcccgtattaataccgtcatgcagatggcttttttccatctgacgcaaattctgcctggcgatagcgccctcgcagaattgcagggtgcgattgccaaaagttacagtagcaaaggccaggatctggtggaacgcaactggcaggctctggcgctggcgcgtgaatccgtagaagaagttccgttgcaaccggtaaatccgcacagcgccaatcgaccgccagtggtttccgatgccgcccctgatttcgtgaaaaccgtaaccgcagcgatgctcgcagggcttggtgatgccctccccgtttcggcgctgccgccagacggcacctggccgatgggcaccactcgctgggaaaaacgcaatatcgccgaagagatccccatctggaaagaggaactctgtacccaatgtaaccactgcgtcgcagcttgcccacactcagctattcgcgcaaaagtggtaccacccgaagcgatggaaaacgcccctgccagcctgcattcgctggatgtgaaatcgcgtgatatgcgcgggcagaaatatgtcttgcaggtggctccggaagattgcaccggttgtaacctgtgcgtcgaagtttgcccggcgaaagaccgtcagaatccagagattaaagccatcaatatgatgtcgcgcctggaacatgtcgaagaagagaaaatcaattacgatttcttcctcaacctgccagaaatcgaccgtagcaaactggaacgtattgatattcgtacatcgcagctgattacaccgctgtttgaatattccggtgcttgctccggttgtggcgagacgccgtatattaaattgctgactcagctctatggcgaccggatgttgatcgctaacgccaccggctgttcttcaatttatggcggtaacctgccctctacaccgtataccaccgatgccaacggtcgtgggccggcatgggcgaactctctatttgaagataatgccgaatttggccttggtttccgcctgacggtcgatcaacaccgtgtccgcgtgctgcgtctgctggatcaatttgccgataaaatcccggcggaattactgacggcgttgaaatcagacgctacgccagaggttcgtcgagaacaggtcgcagctttacgccagcaactcaacgatgttgccgaagcacatgaactgctacgtgatgcagatgcactggtggaaaaatcaatctggctgattggtggtgatggctgggcttacgatatcggctttggcggtctggatcatgtattgagtttgacggaaaacgtcaacattctggtgctggatacgcaatgctattccaacaccggtggtcaggcgtcgaaagcgacaccgctgggtgcagtaactaaatttggcgagcacggcaaacgtaaagcgcgtaaagatcttggcgtcagtatgatgatgtacggtcatgtttatgtggcgcagatttctctcggcgcgcagctgaaccagacggtgaaagcgattcaggaagcggaagcgtatccgggaccatcgctgatcattgcttatagcccgtgtgaagagcatggttacgatctggcactcagccatgaccagatgcgccaactcacagctaccggcttctggccgctatatcgcttcgatcctcgtcgtgccgatgaaggcaaactgccgctggcgctggattcacgcccgccgtcagaagcactggaagaaacgttacttcacgagcaacgtttccgtcgtctgaattcgcagcagccagaagtggcagaacagttatggaaagatgctgcagctgatttgcaaaaacgctatgacttcctggcacaaatggccggaaaagcggaaaaaagcaacaccgattaaatgctctggataaggattacccaattctaaaaaaaagcccggacgactgttcgggcttgtctttttatatgttggaaaatcagtggcaatgcaatggcccaacagaaaataaaatctgtgacaataaaggcatataacccgcgcagaataacgtatagaaaattaaaagtataatttttattttgtatgtattatcttcgatacattcaccagacttattatcatttcagaagaattatttgattaaggttttacttaaggcgtaacaaatgatatttatcggctaactgaacttctcctttaggatgttttcactccccggaatggggataaaaggcaaataaaataactaaaggatttattcaatgaaaagcaaagtactggcacttttaattcctgccctgctcgccgcaggtgctgcacatgcagccgaagtttataataaagacggcaacaaattagatctgtatggcaaagttgatggcctgcattatttttctgataattcagcgaaagatggcgatcagagctatgcgcgtctgggttttaaaggcgaaacccaaattaacgatcaactcactggctacggtcaatgggaatacaatattcaggcaaacaacactgaatcttcaaaaaaccagtcatggacccgtctggcatttgccgggctgaaatttgcagattacggttctttcgattacggacgtaattatggcgtaatgtacgacatcgaaggctggaccgatatgctgcctgaatttggcggtgactcttataccaatgcagacaactttatgactggtcgtgccaacggcgtcgcgacttatcgtaatactgatttcttcggtctggtaaatggtctgaacttcgcggtgcagtatcaaggtaacaacgaaggtgccagtaatggtcaggaaggcaccaacaacggacgtgatgttcgccatgaaaatggtgacggctggggtctttccacaacatatgatttaggcatgggctttagcgctggtgcggcatacacctcatctgaccgcaccaatgaccaggttaaccatactgcggcgggtggtgataaagcagacgcgtggactgctgggctaaaatacgatgctaacaatatttacctggcaaccatgtattcagaaacgcgtaatatgaccccgtttggcgacagcgattatgctgttgcaaacaaaacccagaactttgaagtcactgcacagtaccagtttgattttggtctgcgtccggcagtctctttcctgatgtctaaaggccgtgacctgcacgctgccgatggtgcagacaacccggcaggtgttgatgataaagatcttgttaaatacgccgatgttggcgcgacttactatttcaataaaaacatgtccacttatgttgactataaaatcaacctgttggatgaagatgacagtttctacgctgccaacggcatctctaccgatgatattgtcgctttaggtctggtttatcagttctaaatcctcctgcccgctgttatggcgggctttttctgcttattcttcctcctttgatctaaattaaaaatgtgaactccgtcattacacaaaaagtgtcatctggcgttacactttatgcggatactaaaacaggaggttttatgaacagaacgattcttgtccctatcgatatttccgattcagaattaactcaacgcgtgattagccacgttgaggcagaggcaaagattgacgatgcagaggttcatttcctgacggtaataccttcactgccttactatgcctctctgggtttagcgtattccgcagaattaccggcaatggatgacctgaaagcggaagccaaatcgcaactggaagagatcattaaaaaatttaaactgccaaccgacagagtgcatgtccatgttgaggaaggctcgcccaaagaccgcattctggaattggcgaagaagatccccgctcatatgatcatcattgcttcccatcgaccggatatcaccacttatctgctcggttccaacgccgcagctgtagtgcgtcacgcagagtgctccgtgctggttgtgcgctgacactaacgcccgcacattgctgcgggctttttgattcatttcgcaaatgtgctgacattttcccctctaatccgtaccatacacgccacagttttatatcagatttcttatgctgggcgttccggcatgacgcatactcttctgatgccatataacgaattgagtcgcttttaaatgtcgcaaaatcaagaaattagtaagaaagaacaatacaacctgaacaagtaagggcaaaaatcacaactatctgacccataagtattttatttatttttcaatatgttaaacattatcagcgacaacaataagctacgataacccactctttttttgccccttttttgccccttctacagcgttttgccccatttttgccatcaacaattttcctcataaagtcatttcaaagcctaatagctgctctacttttttcctcaatatcatgtcgccagcaggaaacaacctaatccctgttttaggcctcaaagctgttaatgataatcattttcattttgtatgggttatgctataaaacatagccgttgctatgtttgttctaattttgctcactataggtactaaattatgcactcaataaaaaaagtaaccatgctcttggggtgcctcgccctcacctgctcgatcgcatttcaggcaagtgcaactgaaaaattcaaggtcattacaacatttaccatcatcgcggatatggccaaaaacgtggctggagatgctgcagaagtctcatccataaccaagcctggtgcagaaattcatgagtatcagcctacccctggcgatattaaacgtgcgcagggggcacaactgattctcgccaatggtatgaatctggaattgtggttccaacgcttttaccagcatctcaatggggttccagaagtaattgtctcttcgggtgtgacgccagtagggatcaccgaaggaccctatgagggcaaacctaatccccatgcatggatgtcgccagataatgctctgatttacgtcgataatattcgtgatgcgttgataaaatacgatccggcaaatgcacaaacctaccaacgtaatgccgatacttataaagccaagattacccaaacccttgcccccctgcgtaagcagattacggaactccctgagaatcagcgatggatggtcaccagtgaaggggctttttcttatctcgcacgcgatttggggctaaaagagctttatctgtggccgattaatgccgatcaacaaggaacaccgcagcaggtacgtaaggttgttgatatagttaagaaaaatcatatcccggcagtctttagcgagagtacgatttccgataaaccagcgcgtcaggttgcgcgtgaaaccggcgcacactacggcggtgtgctctatgtcgattccctgagcacagaaaacggcccggtacctacgtatatcgaccttcttaaggttactaccagtacgctggtacagggaattaaagccgggaaaagggagaaataatgatgcaatctgcaggcattgtcgttaatgatgttactgtcacctggcgtaacgggcacacagcactgcgcgatgcatccttcacagtaccaagtggatctattgccgctctggttggggtaaacggttccggaaaatcgacgttgtttaaagcgattatgggatttgtgcgtctgaccagcggaaagatatctgttctgggtattcccacgcgacaggcgctacagaaaaacctggttgcctacgtccctcagtcagaagaggttgactggtcatttcctgtactggtggaagatgtggtgatgatgggccgctatgggcatatgggtatgttgcgtatagccaaaaagagggatcgtcagattgtcaccgatgcgctggaacgtgtcgatatggtggattttcgccatcgtcaaatcggcgagctttccggtggacaaaagaaacgcgtctttctggcgagagcgattgcacagcagggtgatgtgatcctgctggatgaaccttttaccggcgttgatgtgaaaaccgaagcgaaaatcatcagcctgttgagggagttacgcgcggaaggcaaaacgatgcttgtctcaacgcacaatctcggctcagtcacgacattttgcgattatacggtcatggtcaaaggcaccgtcctggcaagcgggccgacagacaccacttttacagccgagaacctggagctggcttttagcggcgtactgcgccatgtcacacttaacgactcggaagaaagcattattactgacgatgaacgcccttttgtggcacatcgaccgtcagcggtgcagagggaagcaagatgaacgtgctactggaacccttcagctatgaatatatgctcaatgcgatgtgggtctcggcaatggtcggcggtctctgcgctttcctgtcatgctatctgatgctaaaaggctggtcgctgattggcgatgcgctgtcgcactctattgtcccgggtgttgcgggggcatatatgctggggcttccgttttctctgggagccttcttttccggcggactggcagcgggcagcatgctgtttcttaaccaacgcacccgcttaaaagaagatgccatcatcggcctgatcttctcgtccttttttggcctggggctgtttatggtgtcattgaacccgacatccgtgaacattcagaccatcgtcctgggcaatattctggcaatcgatccggcggatatcctgcaactcactatcattggcattctctcgatcatcgtgctttttttcaaatggaaagatcttatggtgacctttttcgacgagaatcacgcccgtgctattggattacatccgggcagattaaaaatcctcttcttcaccctgctgtcggtttcgaccgttgcggcgctgcaaacggttggtgcctttctggtgatctgtctggtggtgactcccggtgcaacagcatggttgttaaccgatcgttttccccgcctgctcataattgctgtaactattggcagtgtaaccagtttcctcggcgcgtgggtcagttactttctggacggcgcgacaggtggaatcatcgtggtggcgcagacactgctgtttcttttagcatttgtatttgcgcccacccatggacttttggcaaatcgtcggcgtgcgcataaagcgctggaggatcgctcatgatggcattattactggagccactgcagttcacctttatgagtcacgcactgctgatttcactggtagtttccataccctgtgcgctgctgtcggtctttctggtcctgaaaggttgggcactgatgggtgacgcgatgagtcatgcggtttttcctggcatcgtgcttacctggattctggggttacctctggctacaggggcattcgtcgccggagtattctgcgcggtggcgacgggatacctgaaagacaacagccgaatcaagcaagatacagttatggggattgttttttctggcatgtttgccgcaggtctgatcttgtatattgcaatcaaaccagacgtacatcttgaccatattcttttcggcgacatgctcgggataaccatcggcgatataatccagacggtgattattgccgggctggttacacttgttattagcgcaaaatggcgggattttttgctgttcagctttgattatcaacaggcgcaggtaagcggtttgcatacgagatggctgcattatgggctgctgtgcatggtttccctgaccattgtggcgacgctgaaagcagtaggtatcattctctctatttctctgctcattgcgcctggcgccattgcagtactcctgacacaacgctttcatattgcgctcctactggcgactggcatatcggtaatagtgtcaatgactggtgtctggctgtccttttttatcgacagcgcaccagctccgacgattgtcgtcttattcgcggtcgtgttcatcatgacgtttaccgttaccagcatcaacgcacgcacaaagggaaacgcccatacacaggatctgttatcacccaattagcacaacatccgaggacagcatcgtccgccagcctacagaagtccggaaagccatggaaggtcgttgggaggaggtacgaattctatcatgcaaaaaatacgtaaaatcgataacgcctagaaatcattcaatactcgcactatcgaaagtttaccagccaaccgcggcacgttcctgcatacgacgtgccgcagcttctgttattccacgataaaattcctaaccgaattcaaatccttcagactattcagctcttccttcagctcccgctgacggcgataaatctcgtcattgcgctcaacctgtgcctgagccattgctgccgccagttcttccagttccggcatcgacagtttcacctgctgattatcggcatcaccccacgtcatcacgtcccgtacaatgtcggatttcgcagccattaccaccggataaaggcggcccagtgagttggggccagcattccagatacgaccgttccattcaaacgtgaacggcttcgcctcctgttctgtgcgccatgcttcaattccctgacgtctggcctctctggccgcttccagcatttctggtgtcacagtgaatggggctatctcaccccatttgccactttgcagttcctgccagattcgctgacccgtcggtgcgacatcatcagcggtggctgtgtaggggactgcctggtccctgtcgtcaaaaaaaacgtcacagtctactgcgccactttcggtataacggggattaatgatttttttaatttccacggtgcattcctcacgatgtgcgaataaaaagcccgggcattgcgccagagacatgagcatccggcaccccggacagggcgctatatgaccccggtaatgaatgctctgaacatcccgtaatgaaaaattgtggggatgctatatacgttccggtgggagtactgggcactgaaatccccaccggtcccagtcgtgagcctctgtatgactgccccctgacaagtctgatgactttatcaccgtcagcttctccctggtacgcagcaataatcagcccgccaatgtcagggtctccccatctgttgcagacagagctcgccacgattctgtaaataatatcttctgtggggtaatgactccaacttattgatagtgttttatgttcagataatgcccgatgactttgtcatgcagctccaccgattttgagaacgacagcgacttccgtcccagccgtgccaggtgctgcctcagattcaggttatgccgctcaattcgctgcgtatatcgcttgctgattacgtgcagctttcccttcaggcgggattcatacagcggccagccatccgtcatccatatcaccacgtcaaagggtgacagcaggctcataagacgccccagcgtcgccatagtgcgttcaccgaatacgtgcgcaacaaccgtcttccggagactgtcatacgcgtaaaacagccagcgctggcgcgatttagccccgacatagccccactgttcgtccatttccgcgcagacgatgacgtcactgcccggctgtatgcgcgaggttaccgactgcggcctgagttttttaagtgacgtaaaatcgtgttgaggccaacgcccataatgcgtgcagttgcccggcatccaacgccattcatggccatatcaatgattttctggtgcgtaccgggttgagaagcggtgtaagtgaactgcagttgccatgttttacggcagtgagagcagagatagcgctgatgtccggcagtgcttttgccgttacgcaccaccccgtcagtagctgaacaggagggacagctgatagaaacagaagccactggagcacctcaaaaacaccatcatacactaaatcagtaagttggcagcatcacccttctgtggttatatttattttcacccagccagtcagtctggatatgggccagtagcagtagcgggtgtgataaatggggccgttaatgccgtaaaaagtaagggatttggctctgtacctcggttctgttgtctcagggcgtgcatcagtccaccggatgctgagccccccttcaaaccgtgtgtcgggtatgatgatgtcgtaggggccagcaacggaatattcacctggcagcgcattccttacccaggccaggaaatcactcttagtgtcaaaacggataacatcttcaggcagaaaagcacacccaaagccgaatgcgccgggtatcgccagacggctgaggtgtactggcaatagcggacactaccatttgttctttttttaagcagccatctgatgatatttttccctgaaggctgccggggagatattccccagacgagagtgacgacgctgacgattgtagaaaatctcaatgtattcccgtattactgagatggcttcatcccggttattaaaacgatagtggctcaggctctcatttttcagcgttccccagaagctttccatcggagcgttgtcgtaacagttacctttacgcgacattgatgttttcagaccagactgctcctgtatgacccggtaatcgtatgcgcagtactgtgaacctcgatcagagtggtggattagcccggcaggtgggcgctggctcctgagcgccataaacagggctttacctgtcagctcttttgtcatgcgctctcccatggcgtagccgacaatttcgcacgtataaacatctttgatgccagcgaggtacaaccatccctcctgtgtggcaacatacgtcaggtccgccacccagacctgatttggtgctgtaggagcgaacgtctggttcagcagatttggcgcaactggcagattgtggttcgagttcgtagtcgctctgaacttgcgtttctgcttacagcgtagccttagctccttacgaagacgtgccagtcggtcacgaccaacgatgatgccattctctgccagctccgtctggagccgccgggttccatatgtttcgcgagtgcggatatgtgccaccttaatctccagttttagccgctcatcactttgttttctgtctgagggttcatgctgtacccagttgtaataaccgctcctggatacaccaaatacctgacacatcgcttcaatgggaaattgttgtcgccattgttcgattaacgcgtatttttcagcgactcctgtgcaaaatacgctgttgctttttttaatatatctcgctcaaggcgagcttcatttaacgccttacgcagttgcagaatttcagattccagttcagccaccgtgcgggaaccaggagtaccgagcccttttctggcggcggtaacccattgtcctaaagtgccttcaggaagagataatcgggaagcgccttcactgatcgaaagttgattttcaggaaccgttctgacagcttcggctttgaactctttagagtaacgttgggtttttctgctcattattagctccttctgatgccattctatttcaggaaggagtgtccgttaaactcaggctacctcattctggcgagtcgttttttggagtgttcgcgggctttttcctccgtcatctgaataatcagcatatcagcaggatcgcaaatcacgttgtaaatcacccagccgtcaatcaggccgatagtcttgccggttcgtgccgggccaacaaatatcactgcgtcgtattcacgcgaggccaggcagttcatcggctcaataacatacggtgccaccagcggatcccacgggactgagttccctgcccccatgggcacccgcatatactgagcaacggcatcagcaacccgcattcgtctcggtgcgcgaaggatataacctgaatcggttcgtgctgcctttgcggtttcctgattcagcattactcctcctgctgtaattcctcctcatcatccgcacctgcttcagtcacccgcagggctatctgatcgcgcagatcatcaataatggactgaacacggctcacagcggcaggctgcagaccgcagtcacgttcaagaatatccggtaatgtctccagcacctgcacgaccgcttttgcccagatggcaaactcccgtctgacatcactggccggaatgagttgtgccgtttcctgttcgaacttaagacgctcacgttcagactgataccaggctttgcgctcatgcgcgtccatttcgccttctgcaaccggcggtggtaatgccagaaatgccgacacaatatcaaccacccgataaagcttgaggttgctttcatgcccccctgcaacgggtagattttgcagccttgccgcagcagtctggcgatgtacacctgacagtgccgccagttgactgatattcagcgtcagattttttaactctcgatccatacccgctccagaatgttttaaacatgcatcttgcgaacaactttaggcaaacggtgttagtgatgaacaaaaaacaatcaaaatcgacaccataaaaataaaaccactgtaatatcaatccattacagtagtggtgatgacgaatgaaatttcaaaaactagcctttttccgcgccgctcccgccccgtggcaggccaccccaccgggaggacccgtcagcctgacagccatgacgaacgtctgatacagcgccctgcatgaatgacatcgggataatccagaaaggaatagcatcgtacccacaagaatcagtgtaagtgtcctgtttcttccacccccgcacaggactggcgagcatgagggacaaacccgcgaaccataaacgcggtaaaaacccggtgtgcatcgtttttgattattcccgcacactcgcgcagaaggagttccccgtcgggctacggtcatggttaatacgggaatacggcgacgatacagcgcatgatgtgtcaggcttgaatacctttatccgttaaaagggatatcagttaagttatcccgtgtagggtataagccattatcaaagccactctgtaggaagtggcttttgtaatggcaataaaaagccccgcgaatgcgaggctaaatcctggtatttgtaatgactggctcttatctcaacgcagccccttaccgcgcgcaaaatgctcaatatcaagcatcagcaatgagatgtttaatctggattcactccagaagtgagcaccaccctgtctacagagccagatgtgaaggatgatgagtaaaattatcgctatcatcgaaggcattgcgtcctgatgtattcctgaagcgttctcagtgctgtttggtcgcggataattccgtcccggataccgagaacgtttcgtccagcaactggagagagttcgacggtggcatcattgcccatgccggaggcgctggaggtttcggctgaggatggcacagggcattttcctttgacgagcacccgaccaccattatcaagcttgcgccgaagagcatcattttcagctttcgcatcagctaactccttcgtgtatttagcatcgagtgcatcagcatcacgctggcgctgctgcatgtcagtaatggttgcgttcgccagcttcagttctcttgcgtttttgtcgcgctgctctttgtaggtaatggcgttatcacggtaatgattaacagcccatgacaggcggacgatgatgcagataaccagagcggagataatcgcggtgactctgctcattgctgcccccacaaacagacttcacgctcaatctcacgacgggtcatcagccctttccattgcttaccgccagcatatgtccagcgacgtagctggtcacatgcgcctttgatatagccctggtttattttgcgaagaagcgtcgatgttctgaaattgccagcgcccacgttgtaaacgaacgagtaaagagcgccgcgcgttgtttccggtatatcgactttgatgtacgggttaatttgtctggcgacagtggcaaggtctttattcaggagagctttgcattctgcttcggtatacgttttaccaggcatgatgtcttttccggtgtgtccgtgacatacagtccatacaccaatgatatctttgtatggtatgtagctgacaccttccagaccatcgttaccacctgggccagtgattaacacagatgctatagcaacagccccgccaccaatagcaactgcaacagccttgcgtaatgatggcgacattattcacctctcgcagccttacgcttatcttctcttattttgaaatacagattcgtcagataagtcagaagccccagaagcagacttcccagcacaccaatcgcagcccactgtgatggactgacctgatccaaccactgcaaaaaccagtagccggcactgccggcggaggtgccgtaggcaatgcccgttgaaattttgtccatggatttcatagcctcacctccgcaaataacggatggcgtagttttacactgagaaatgaaagggatttgaaaagaaaaaaacgcaaaagcgggcgaaacgatatatacagtaaggaaagcactgaggtagcctgagtttaacggacactccttcctaaaatagaatggcatcagaaggagctaataatgagcagaaaaacccaacgttactctaaagagttcaaagccgaagctgtcagaacggttcctgaaaatcaactttcgatcagtgaaggcgcttcccgattatctcttcctgaaggcactttaggacaatgggttaccgccgccagaaaagggctcggtactcctggttcccgcacggtggctgaactggaatctgaaattctgcaactgcgtaaggcgttaaatgaagctcgccttgagcgagatatattaaaaaaagcaacagcgtattttgcacaggagtcgctgaaaaatacgcgttaatcgaacaatggcgacaacaatttcccattgaagcgatgtgtcaggtatttggtgtatccaggagcggttattacaactgggtatgaagtggtcaacaaaaactggccaccgagttagagtttttccagtatcgattttccgattcgtttgggggtaacccaccgttatattcgtgcggtcttagtgcgctgtaatatccaacgatatagtccgttatggcgtgagctgcctcgctgaagcttacgtaacccaccaccggcatccattcgttcttcagactcctgaagaagcgttccattgggctgttatcccagcagtttccgcgccggctcatactctgtctgatctggtatcgccacaataactgccggaactgcctgctcgtataatgactgccctgatcgctgtggaacatcaccccgccgggcttaccacgggtttcccatgccatttccagcgctttcatggtgagcctgctgtccggcgagaacgacatggcccagcccactggttttcttgcgaacaggtcgagaacaacggcgaggtacgcccagcgcttacccgtccagatataggtcacatcaccgcaccacacctgatttggctcggtcacggcgaactgcctttcaaggtagttagggatagcaacatgttcatgaccaccacgtttataccggtgagtcggctgctgacagctgaccagccccagctctttcatgagcctgccagcaagccagcgtcccatctggtagcctctccgggttgccattgtggcgatgcttcttgctccggccgaaccgtggctgatgccatgtagctcaagtacctgactgcgtaatacagcccgtctgccgtctggtttttcaggacggtttttccagtatctgtagctgctgcgatgaaccccgaacacatggcagagtgtgaccacaggataatgcgctctgagtttcccgattatcgagaactgttcagggagtctgacatcaagagcgcggtagccttttttaatatttcattctccatttcaatgcgttgtagctttttcctcagcttacgtatttcgatttgttctggtgttatcggagaggcttttggtgttttgccctgacgctcatcacgcagttgtttgacccatcttgtcattgtggaaaggccaacatccatagctttggcggcatctgccaccgtgtatttctggtcaacaaccagttgagcggattcgcgtttaaactctgcgctaaaatttctttttttcattggagcacctgtgttgttctgaggtgagcatatcacctctgttcaggtggccaaattcagtgtgccacttcagtacagcatgaaccctcagacagaaaacaaagtgatgagcggctaaaactggagattaaggtggcacatatccgcactcgcgaaacatatggaacccggcggctccagacggagctggcagagaatggcatcatcgttggtcgtgaccgactggcacgtcttcgtaaggagctaaggctacgctgtaagcagaaacgcaagttcagagcgactacgaactcgaaccacaatctgccagttgcgccaaatctgctgaaccagacgttcgctcctacagcaccaaatcaggtctgggtggcggacctgacgtatgttgccacacaggagggatggttgtacctcgctggcatcaaagatgtttatacgtgcgaaattgtcggctacgccatgggagagcgcatgacaaaagagctgacaggtaaagccctgtttatggcgctcaggagccagcgcccacctgccgggctaatccaccactctgatcgaggttcacagtactgcgcatacgattaccgggtcatacaggagcagtttggtctgaaaacatcaatgtcgcgtaaaggtaactgttacgacaacgctccgatggaaagcttctggggaacgctgaaaaatgagagcctgagccactatcgttttaataaccgggatgaagccatctcagtaatacgggaatacattgagattttctacaatcgtcagcgtcgtcactctcgtctggggaatatctccccggcagccttcagggaaaaatatcatcagatggctgcttaaaaaaagaacaaatggtagtgtccgctattgccagtacacctcacactctatccaacaaaccacccacagttaatcggaataaaagcagagtgcttatgaatgatcgcacgcccgaaggttagtatttctgcacagcaattttgcaaaaaaaggcgatcattcataacttaaacgtctttcagtcactccgggatttcccatcatcgcagactgaaagactctgactggagcgggcagcgggaatcgaacccgcatcatcagcttggaaggctgaggtaatagccattatacgatgcccgcatatggtgccgactaccggaatcgaactggtgacctactgattacaagtcagttgctctgcctgctgagctaagtcggcgctggcccaccaccgaggactcgaacctcgcaccgtcaacttagaaggttgatgctctatccggatgagctagtggtggttggtggcccttgctggacttgaaccagcgacctggcgattatgagtcgctcgctctgaccaactgagctaaagggccggaggcagaataataaccatatgtcatcacatctgcaaactcatctgaccaccagcacgtttaacgtcctgtgccgtttttcaggtataaaaaaacccgcataaagcgggctctttcaaatgtccatgtctgctattcgcctcgcggtacagctttgcgaagcgtacaagaattgaagcagtttttacgtcaaaaagcaataacttttttctctataccaaaagccataaccattggtttgtacaaaataaattctgccacctttagccaatgctcaatgcgtctttcacaggttcttaaactccatttcgggtgtgcatcattcagcagttcagccattttgcgtttggtcatcccccgcccctcataccgttgccgaaggacgctaatcaatcctggatgctctgccagcacctcacttatgacccgatcaatacataacgcctctgcatcagtacaatgcgccagccagctcttttgcttaccgttaatcatatcccgcaaaaaagcctcaagttcagacttgttcagacctgcttttttcatcctccggagcgcctcgttaattgccgtttttgtcagctttttagaggtcaacatcaggttaaacatattccccgtcttaccgccaccaatatacgaccagcgcccccacatacgtagttttccctgaatccagacactttccagcgtggtgagacgaaggtgttctccgctttttcctgtattcgttgggtaaatcataaatatccctcctttctccagatttcttgtgtgcgaaaaacaccttctgcatgcatcaggcgtaattcttctttggtgtaatcgctggtttttacccgcccgtcgattaaatcgtggcacgagctacaggcaatcgctgcctgcatatcgtgtggctttatcgctgttccgcacgttcccgccagtcggtaatgcgccagcacagacgtttccggatcgtgattgcagtagccaggaattctgacggtgcacatctgcccccgcgccgctttacgtaaatccaccattacgcaaactccagcagctgcgcggccacattttcgacttgttccggagaggaaaatttacggaacagaatccagttccacagcacattcagaacagatttataaacctgctgaaactcggtttcgtccatattcgcaaaagcgatggattttgcccgacgcccgcggctaccgtccggataaaaatgttcggtgtaaaatccagcctgaatggttacccactcgcgaaaagcctcaaacgactttagcaatgccgtatcccgggttctgcgtgtcgcaactgtattcagatattgctctgcggcttcgctcagagctggcgtatgttcccgacctactgattcgcacaggtaatcaacgaaaccagacagcagttctcgttcgcgaggcgtgatcgccccaccgaccggagtccagtaatcgaatcccagttgcaggagtttgaaaaaacgcttgtggaatgcgtagttacgcacacgcttaaagtctgcgtgtatccactcacctgttttgatttgatgcagaaaatcgcaactctccggcgtcgccgggagaagtaatccggaagaggtttgtttgatcagttgtatatgcgccatcgtagttctccgctggcgcagtagaatgggtgttcagcccgttatgtagtataccagaattaatgccaatactaacaggatgctctgactcgcaattcatccagcagtttatcatttcccataatgtcacttaccctcatcggtaaaaaaattgcctttcgaccattacgatacatcattgattttttggtttcagggaagtaatccatttcgactataactgacaggtcatcacgacgtatgactgcgtatttactactaaatagtttctttattttttccacgatgcctccaggtttataagtacaaacggttatatcaacatagagacaaaaggtgatgctgccaacttactgatttagtgtatgatggtgtttttgaggtgctccagtggcttctgtttctatcagctgtccctcctgttcagctactgacggggtggtgcgtaacggcaaaagcactgccggacatcagcgctatctctgctctcactgccgtaaaacatggcaactgcagttcacttacaccgcttcccaacccggtacgcaccagaaaatcattgatatggccatgaatggcgttggatgccgggcaactgcacgcattatgggcgttggcctcaacacgattttacgtcacttaaaaaactcaggccgcagtcggtaacctcgcgcatacagccgggcagtgacgtcatcgtctgcgcggaaatggacgaacagtggggctatgtcggggctaaatcgcgccagcgctggctgttttacgcgtatgacagtctccggaagacggttgttgcgcacgtattcggtgaacgcactatggcgacgctggggcgtcttatgagcctgctgtcaccctttgacgtggtgatatggatgacggatggctggccgctgtatgaatcccgcctgaagggaaagctgcacgtaatcagcaagcgatatacgcagcgaattgagcggcataacctgaatctgaggcagcacctggcacggctgggacggaagtcgctgtcgttctcaaaatcggtggagctgcatgacaaagtcatcgggcattatctgaacataaaacactatcaataagttggagtcattaccaaaaaaaccgccgaaacgggttaagtgcgggtgcgttgaggatgcctgacacatcaaaggtggcgggagattactctcccgcctggtcactcttactctctagattcgtagtctacgaaaacagcgacctccgtctggccgattcggattcgtacctcgcagaggtctttcctcgttaccagtgccgtcacaatgacggttaaacagatgacgatcagggcgattaacatcgccttttgctgcttcatagcctgcttctccttgcctttcggcacgtaagaggctaacctacatttgtgagacatagattgggcctcagattaatgttaagcgtcttgcaggacgcgtaatgttaactggggcttttctctgtctgccttacagtgacatacccgaggcagacagcctcaagcacccgcagcaatcttaccgacaccgataagaaaacgctattttttattgccagcaccatctatccaggctagtttatctgcgtcagaacggcgcaatgcgctcgcctgagatacgtttacttgccatggtaacaacaggtaacggcaattgctgtttctgttttgtttccttcaaaaaccccggaccatcaatccggggtttttgtttgttaaccccaacggcaaatcgaatacaccaccagcgccaccgccatcgcaattcctaccgtggtgaatgcctcaggccaggtcattgattcacctcctgcggtggttccggtagcggcatccagtgagttgagctctctacttcaacgccgtctttgtccacaaaagccatcttattcccgccacgagtggggcaaaaaaccttatcccaggaaccggggaatacattcccgagatcatcgagaagaatcacatcgcaatattcagcaggaactgcatcactacagcttatccagccagccggagctaccggagagttgccagccttacgcatggccatttccacgatttcaaccatatctcctggtggaattttacaaagttgcccaatacatttctgctgcctggcatattcgagaatgtgctccagtttggttcgattaatcattatttatctcccttaagcatggcagcgcggcaggcgttccagccatcaacataatcaaacgtattactatcgtttggcccgatttcatccggcactatcggctctggttggatagtgacgttggcaaaggcagcacgcaaaccggttttaatttcttcgatttcatcagagccaagcgatgaatctgacagtgcgtgatggaatgcgtaagccatgtcgtcgtttactgcaaccggcactgccggcgctgcgtaaagcggtgttatatctgcccgaaaatcacatgctttatgcagtcgtacccaacactcaacttccgctttgtcaaaatatatagcagtgaacgtattagattcctggtcaacttgagtaaacgtcaccttccacgctacagctacggctttccatccatcaggttgtcgcattcgcggggcagcataaagctcatgcattccatcaggcagcgagtgacccacatactcaccgaacccgtcaatacacatgcccccatcttcaacaatgcattccgctacaggctctgcttccagtgatgccagagcgataagcgccagttcacgaatttcaccgccgtctatatcgtcaatatcatcgcggccagaaatgttagccagccattgcagtcgctctttggtaatagtggtcatgccgtagccccttcttgatatttttcaaaccagaacacaaccgggtcagatttcatttcaaccaatcccatacgaaccagcgctttgcctttcccggacgcaaggaattcacgacgaccatcactgataattcgtcgataatcttccaggctactgcaatgcttgtgcagattgcatgggtggcatgctggtaccatgttggatatatcgtcacgttcctggtgaagcatatttccatcaaaacgaatgaccggttttacatggtctgcatgccacttttcgccaagttcgcagccgcaataagcgcagcgaccaccgaacttcatgcgcagttctgcacgttgttttttcgtcagtgccatatcagctttccttatacggattaattttattgtgcagtgtgttgaatgacgcccataccacgtcgttatacaattcaataactggctcaattatttttccgattatccagacaaaaattagcggggatatcggtgtcatcaacacgataaacagaatgagaaacaggaattctgttgttctactctttcgcggatatttttttctaaataatgtaaccattcattaccgccctttcgagcggtctcctgatgatttgagggtgcagaaatccctccggttaaggattaaatttttaacagtgctaaatttaattattcagttctggattttgtcgccctgcgtatccgcgctttcgcgttacgctcaatctgtatcagcttttctatatttctccgcctttcctgttcctcctggcgcaatagccttacatcatctgccagtctggtttctctttttgccacagagagcatccagtcaaacggctccacaaccgcaccgcagattttacagcggacctgacgctctttttcgtcaacccggacagaggcgtgatggcaatatggtctttccgatggttcataaagaaaattaacctgattacgtgggtcatcctcttttaccggaaataaaacgatattgcttaactcatcttggtgatgctgccaacttactgatttagtgtatgatggtgtttttgaggtgctccagtggcttctgtttctatcagctgtccctcctgttcagctactgacggggtggtgcgtaacggcaaaagcactgccggacatcagcgctatctctgctctcactgccgtaaaacatggcaactgcagttcacttacaccgcttctcaacccggtacgcaccagaaaatcattgatatggccatgaatggcgttggatgccgggcaactgcacgcattatgggcgttggcctcaacacgattttacgtcacttaaaaaactcaggccgcagtcggtaacctcgcgcatacagccgggcagtgacgtcatcgtctgcgcggaaatggacgaacagtggggctatgtcggggctaaatcgcgccagcgctggctgttttacgcgtatgacagtctccggaagacggttgttgcgcacgtattcggtgaacgcactatggcgacgctggggcgtcttatgagcctgctgtcaccctttgacgtggtgatatggatgacggatggctggccgctgtatgaatcccgcctgaagggaaagctgcacgtaatcagcaagcgatatacgcagcgaattgagcggcataacctgaatctgaggcagcacctggcacggctgggacggaagtcgctgtcgttctcaaaatcggtggagctgcatgacaaagtcatcgggcattatctgaacataaaacactatcaataagttggagtcattaccaactcatcttctggttttatttccatgctcctctcctttgatgcgaataccagcggtaattgaagcctgatagctaattttactcacagtaccgcctcctgaaatttcccctgataaaacgccagcacgcgctgcatagtgaggtagcctgagtttaacggacactccttcctgaaatagaatggcatcagaaggagctaataatgagcagaaaaacccaacgttactctaaagagttcaaagccgaagctgtcagaacggttcttgaaaatcaactttcgatcagtgaaggcgcttcccgattatctcttcctgaaggcactttaggacaatgggttaccgccgccagaaaagggctcggtactcctggttcccgcacggtggctgaactggaatctgaaattctgcaactgcgtaaggcgttaaatgaagctcgccttgagcgagatatattaaaaaaagcaacagcgtattttgcacaggagtcgctgaaaaatacgcgttaatcgaacaatggcgacaacaatttcccattgaagcgatgtgtcaggtatttggtgtatccaggagcggttattacaactgggtacagcatgaaccctcagacagaaaacaaagtgatgagcggctaaaactggagattaaggtggcacatatccgcactcgcgaaacatatggaacccggcggctccagacggagctggcagagaatggcatcatcgttggtcgtgaccgactggcacgtcttcgtaaggagctaaggctacgctgtaagcagaaacgcaagttcagagcgactacgaactcgaaccacaatctgccagttgcgccaaatctgctgaaccagacgttcgctcctacagcaccaaatcaggtctgggtggcggacctgacgtatgttgccacactggagggatggttgtacctcgctggcatcaaagatgtttatacgtgcgaaattgtcggctacgccatgggagagcgcatgacaaaagagctgacaggtaaagccctgtttatggcgctcaggagccagcgcccacctgccgggctaatccaccactctgatcgaggttcacagtactgcgcatacgattaccgggtcatacaggagcagtttggtctgaaaacatcaatgtcgcgtaaaggtaactgttacgacaacgctccgatggaaagcttctggggaacgctgaaaaatgagagcctgagccactatcgttttaataaccgggatgaagccatctcagtaatacgggaatacattgagattttctacaatcgtcagcgtcgtcactctcgtctggggaatatctccccggcagccttcagggaaaaatatcatcagatggctgcttaaaaaaagaacaaatggtagtgtccgctattgccagtacacctcatagcttcgctcttccggcactcgcgacagattatattcaggcgcctgtcgtagcggcgtatttctccgtctggtaatgaccagataaggtcaggatcaaccacaaccggtttcttcacctttaccctcgatagctttttgcgggcgttttgccagtctttatgagcctgttcagagggaaataccccgtagccagaattatatacatcaccacttgcgaccagttccatgcataagcgaccgacagacgcacgactgatacctgtttcatctgacaactgccgaatcgtgacccgaccgtcctgatgcacgagttccacaattcgcgtcttcagttcttcccgctgttcgggagtaaaaggtttcgccataaatcctcctgaaactacttaacaaccctcgaatggctaacattcggacgccagctctcccagttaaaattcacccagcgcccgccgttcatgaccatgcgatccatcacccgctcgccgagaagtgtattcatcgctgcatggttaatatttgtcagcatccccacaccgcgtaacgatgccgtccggcgatcaacaatctggttcagtaccacctgctcgtttttcgtatcccgctgcatgccaatttcatccaggaccagcaggtcaacaccacaaagctcctgtaaaaatttttcaccggatttgccgttgtcgtagctctcatgcaacacgctcatgacatcggacacggtgacgataatcacgctacgccccttcgccatcagccggttgccaatcgcgtctgcaagatgattttttccggtgccgggcttaccgctgaacacaaaattcgtacagcctgtcatcagttcgtcagctatggatttcgcctgactcagtgcatgtcgctgaccgtcgttctgcgcccggtaattcgcaaacgaacacttccggtgcaacggctggatgccggagcggttcaggattttttccacccgcaactgacgattcaggcggttgatctcctcgcaacgtttctggccttcagcaagttgccactcgcgccactccgcaaccgttctgaatggggcggttacatgtggtggggtcagtctgcggatacgctccagaacgcctcctgtcgcaatatttttcatggtctgttaccccctgaagcctggcgggatcgcactgtccggcaacgagacggtgttaacctgtcggagcaacgtctcaggccgaacacctttcggcgcgaacagaccctggtattcattggcgatgctgtgtcgaatcacctgctcaggtgtaaaaccctgctgacggaatttttccagttcccgtatcgccccgttagcgccctgctccgttcgaatcggttttcgcaatgcctgcctgaactggacccactcatgccagagtgtttctggcaaccagtcgggcagatcaactgacaacgggtcaaattttttctggcgaacagccccaccgataaccagaattccctgctcggtgtgccttgcgatatcactgcgccgcaagacacatatcccggtttcaacagcaccgattttgagcagtgatttctgtcgcggagaatttcggtcaagctcgctcccacaccggacaccgttcctgtcagtcacgacgatatcaatccgccctccgcaaccgtcaccacgctctggcaccggatactcacgacagacatccaggccagcagcctgcaacgcaaccaccgcagaattacaaaattccgctgcagtaccgccagataatctcccctcaagcactccagccacaaaatcccgaaactcccttccggaagggaagggtttgggatgggttagatctgtttttagatctttatctgtatctttattagttgcctttgtgttggcatcatgttcgaacatcactccaacatctgtttgaacacctgttaaatttctctcttgttttgtttgaacatctgcttcctttctgcttcttctggcctgaacagatgcttttcctgcggctgattttttggttaatttttctctgacagatgccagatcttcctcaatccgaagatgcatccattcgtcgccgttatcacaaaaaaactcccgcaaggatggttcaacatcaacccatcgctcgttagtcagacgggcaatttttgccaacctgtttttgggtattggctttcctgtttgccagtaattgaacatcagcaacaaatacgcgccgtgctcctctgctgacaaatgcatggtgtcagccaggtaatcagctatgtacagttgcatgtatggtaatgcggccataattgccccgtatgatgctgcccggttgcttagaataagcacaaacagcatggaaacttttgcttaatgaacaatgacagaatcgtcggaagacccgccgccgctgaaatgcgctttccggtaaacggcctggactgcatcatcatgcgcatcaattgccgtactcaacgcttcctgcgccgccagtaatgcacggcgttccagggtatcgaagatgcagagtcggtgacgcagctcgcgcggaagaattgccagaaccgcagggatcagtttctgaattttttccctttgcgctttcgtttcacctttcaaccaacggtgatagatattctgctgattgttccagtccttgcctggtacaaggggcaattcgccgcccccctggcgcagatattcttcagtaattgcgttagcgacccacgcctgccctttttcggctgccagggctaacaacactgattcgatgtgctcatgcctgattttcatgaatcaaccgctcctatgctgttttcgctatgcttaccgtctggggggaatacatcgtcaagtccacaatgagcgccaagccgattaagggtagaaacaatttttctgcactcctctagtccaggggtacgaaaatttgcttcgtaatttgccagtcggctttgtatccaccctaactgaacagcaagttgtctttgagacagcccaagctgttttcgatatgttgaaattttgttcattgaaaacctccgatgacaattttaaacacaccttgtgttatatagccaagctgttttgtgttttatgtaaatcacgattcgtgatacaaggatgcaatggaaaaagaaaacgaaaaaattgccgctagtaggctcaatgacaaaattgcaatgcgtcttaaagagcgcaggcagaagcttggtttatctcaaggaaaacttgctgaaatctgcggatggacgcaatcgcgtataggtaactatgaggcgggcagcagaaatgttggagtacatgacgctgtcgtattgggaaaggcacttggcatatctcctcctgagctcctctttggagaacaggaatcttctgaattgtggttaaatgaatcccaacgaaaacttcttgagttgtttaaccagctaccgggctcagaacaacaacgaatgattgagctatttgaagtccggctaaaagaaatcgatgagtatgtagaaaaatatttgagaggcaggattaaagataatcccccaccggaataatgatcttgctatcacagtaatatgccaatcagcccgctatcagcgggcttttttgtagcatcatcatatgacactcaccataaaacacattgcgtgttgacacaagaaaacaaattgtgtttaataagcatatccaaacaacgccccaccagagaacggcaggacaatacctcgagttatccagtcactgaacagggctaagtagccagcctgaggcatacgaacatgacggcagttgttgattgatacaaagcgcagtagataaaacgttccgccacccggcgttaaggggaaatggggtcaacatgaatactatcgatcttggcaacaacgaatctctggtatgtggcgtgtttcccaatcaagacggcacattcaccgccatgacgtataccaaaagcaaaacgtttaaaaccgaagctggcgcacgtcgttggttgggaagacattcaggtgagtaaaatgaacgagacagaattaaaacacgttatcgctctactcctaaatagctgcgcggaatagtagatcactttgagggaacttagcccggattgtgcgatctgatcaatcgccaaatcaaaacaaatcaccaaccggactgagcaatgccgatcatagcaccaatttcccgtgacgaacgacgcctgatgcagaaagccatccataaaacacacgataaaaattatgcccgcagactgactgccatgctgatgctgcaccggggcgaccgtgtcagcgacgttgccagaacgctctgctgcgcccgttcctctgttggacgctggattaactggttcacgcagtcgggtgttgagggactgaaatcattacctgccgggcgtgcccgtcgctggccgtttgagcatatctgcacactgttacgtgagctggtaaaacattctcccggcgactttggctaccagcgttcacgctggagtacagaactgctggcaataaaaatcaatgagataaccggttgccagttaaatgccggaaccgttcgccgctggttgccgtctgcggggattgtgtggcgaagggctgcgccaactctgcgtatccgtgacccgcataaagatgaaaagatggcagcaatccataaagcactggacgaatgcagcgcagagcatccggtcttttatgaagatgaagtggatatccatcttaatcccaaaatcggtgcggactggcaactgcgcggacagcaaaaacgggtggtcacgccgggacagaatgaaaaatattatctggccggagcgctgcacagcgggacaggtaaagtcagctgtgtgggcggcaacagcaaaagttcggcgctgttcatcagcctgctgaagcggcttaaagcgacataccgtcgggcgaaaaccatcacgctgatcgtggacaactacattatccacaaaagccgggaaacacagagctggctgaaggagaacccgaagttcagggtcatttatcagccggtttactcgccatgggtgaatcatgttgaacggctatggcaggcacttcacgacacaataacgcgtaatcatcagtgcagctcaatgtggcaactgttgaaaaaagttcgccattttatggaaaccgtcagcccattccccggaggcaaacatgggctggcaaaagtgtagcggtattaagcgcagctatttagaagatgcaaaacgcctccagcaactggagccaaatgcaggcactggggcacgcatctggctggctaaagaagcgctggaatctggcgattatgatagcgaagaagccttctacaaagcagaaggccgtacaggatattcaccgggtcttggcggggtataaataccatgcgcattgactgaattcgcaaacaaaaacagacgcgcgatacctggatagtcggtctgcatagtcagatatctggctgcgaatttgataaatatcaccgcccttttcggaaacataagttccgtccgggagttgattatacgaaccatctccatgggggatcgttctcctgaatcctagtgagagcatatatttatgaagcccttcgtaatcctctggctcagcattatatagttctactctggcgagatacgttggcatattcatttccttactggttgtgtgagaacttcagtaaagataccaccaaagcccggaggtggtgaaataaaaccgggcacaacacgaaggcgcatttccggtatccataaagagtcggtcttgtctgttaaatttaaatggtgggagtgcgcctccggttgtaaataacgacattgctgtgtgaagtaccagttggcggcatcggtttaattgctggctgatgtccgccctttttaaagtgaattttgtgatgcggtgaatgcggctcagcgcacgcggaacagttaaaacagtaaggaaaatcccttattccggcgttaattgttaactggttaacgtcacctggaggcaccaggcaccgcatcaacaaagttcacttcggtgatgaaaggaaagagaaaatgttgaatgtagctattgaaaaccagaacgggtggaattatagtgcacctgcacctcataaaacgggtgccgggattgctaccccgaagtcattcacggcgcataaccgcgctcaggcggtttttttatgcgtaatgcacagccacattcaaattatggtggggcgtgcggggcagtcgcaagactggccgggttccgtgatgaccggttgtagcaaccctgtacgtctcaccacccatgagattgctacctccggtggtgagttaatcaaattcatcgcggaggctgccatcatggctactaccctttctcacccttgtgtaaccgtagaaaacggtcgcgctgtcactacgtctgttgcggttgcagagttcttccacaaacgacacgacaatgtgttacgtgccatcgcaaatattgaatgctcagataaatttactgccctcaattttgaagcgagcgaatacaccgactcaatcgggcgcaaactcccaatgtaccaaatcaccaaaaacggcttcgttttcctggttatgggcttcactggcaaaaaagccgctgcattcaaagaagcctacattgctgagttcgaccgcatggaggccgaactgcgccagaataacaccccacctgctgacaagatgattccgggtgatggtcgcactctggttgttcacttcgacaaattcggcaatgtcgaattcaccgaaaccgttcctgatggcgcactggtctgtaccctggagactttccggttttatctggaaaaacagggatggactcttgttaaccggggcgcaattaaaaatatgactgtggaacaattactcaaaattcattgttgaggacgcaataatggagacgttattaccaaacgttaatacgtctgaaggttgttttgaaattggtgtcactatcagtaaccctgtatttactgaagatgccattaacaagagaaaacacgaacgggagctattaaataaaatatgcattgtttcaatgctggctcgtttacgtctgatgccaaaaggatgtgcacaatgaatacagtatttgcactcgttctgacggtttttcttgtttccggtgaaccggttgacatggttactggcgtatacagctcaatgaaagaatgtatgactgccgcagcgaaacagaaaattcccggtgactgttatccggtcgataaagttattcaccatgataataacgaaatcccggcaggtctttaaaacagttccgtaataaatatccggtttcattcttatatgccagcaatggcaggggttcgctcaaccttaattaaggagaaaaacatgattaccagttatgaagccactgttgtaactactgatgacattgttcacgaggttaatctggaaggaaagcgtattggctacgtgattaagacagaaaataaagaaaccccattcactgtggttgatatcgacggtccatcaggcaacgttaaaacacttaacgatggtgtaaaaaaaatgtgtctggtgcacataggaaagaatctgcccgcagaaaaaaaagccgaatttctggcaactctgattgcaatgaaattaaaaggtgaaatctgaaaaaaagaaagcctgcacactgtgcaggcctgagtgaagaacctgggacatttattcatcactcgcagtaattttaatctgagttgaggttaaaaaacaatgagcaccgataaacaagtttacccactgtatgaggtagcctgagtttaacggacactccttcctgaaatagaatggcatcagaaggagctaataatgagcagaaaaacccaacgttactctaaagagttcaaagccgaagctgtcagaacggttcctgaaaatcaactttcgatcagtgaaggcgcttcccgattatctcttcctgaaggcactttaggacaatgggttaccgccgccagaaaagggctcggtactcctggttcccgcacggtggctgaactggaatctgaaattctgcaactgcgtaaggcgttaaatgaagctcgccttgagcgagatatattaaaaaaagcaacagcgtattttgcacaggagtcgctgaaaaatacgcgttaatcgaacaatggcgacaacaatttcccattgaagcgatgtgtcaggtatttggtgtatccaggagcggttattacaactgggtacagcatgaaccctcagacagaaaacaaagtgatgagcggctaaaactggagattaaggtggcacatatccgcactcgcgaaacatatggaacccggcggctccagacggagctggcagagaatggcatcatcgttggtcgtgaccgactggcacgtcttcgtaaggagctaaggctacgctgtaagcagaaacgcaagttcagagcgactacgaactcgaaccacaatctgccagttgcgccaaatctgctgaaccagacgttcgctcctacagcaccaaatcaggtctgggtggcggacctgacgtatgttgccacacaggagggatggttgtacctcgctggcatcaaagatgtttatacgtgcgaaattgtcggctacgccatgggagagcgcatgacaaaagagctgacaggtaaagccctgtttatggcgctcaggagccagcgcccacctgccgggctaatccaccactctgatcgaggttcacagtactgcgcatacgattaccgggtcatacaggagcagtctggtctgaaaacatcaatgtcgcgtaaaggtaactgttacgacaacgctccgatggaaagcttctggggaacgctgaaaaatgagagcctgagccactatcgttttaataaccgggatgaagccatctcagtaatacgggaatacattgagattttctacaatcgtcagcgtcgtcactctcgtctggggaatatatccccggcagccttcagggaaaaatatcatcagatggctgcttaaaaaaagaacaaatggtagtgtccgctattgccagtacacctcagtattacgaagcaaaaaatgacaaagtaagaaaacgcctcggtattaaaggcggtttttactgggctgaagcgaaaaaattatccattgccatctcccgtggtgctgttgcgattgacgatgctggctacgatgaagatgactttaaaaaacctgttcgcgtcaatttgcccgttgttggtgacctcccaccagaaggcgtgtttgatacggaattctgcaaccgttacgaaaaaggcggggaagatggcatcacaatggtatttatcgcatcttctccctctgttcaggacaaaccagccagcactgacaataccaacgtcaacggcgaagacatgacagaaattgaggagaacatgctcctgccagtttccggtcaggaactgcccattcgctggcttgctcaacacggcagcgaaaaaccggtaacgcacgtttcacgcgacggactccaggcattacacattgctcgggctgaagaactaccggctgttactgccctggctgtttcccacaaaaccagcctgctcgacccgctggaaattcgcgatctccacaaactggttcgtgacactgacaaagttttccctaatcctggtaattcaagcctgggactgataactgcttttttcgaagcatacctgaacgctgactacaccgatcgaggactgctgacaaaagagtggatgaagggtaatcgtgtttcacacatcactcgcacggcttccggtgctaatgctggcggcggaaacctcaccgatcgcggcgaaggtttcgtacacgatctgacgtcactggcgcgcgacgtagccactggcgtactggcccgttcaatggatctggacatctataaccttcatccggcacacgctaaacgcattgaggaaattatcgctgaaaataaaccgcccttttctgttttccgcgacaaattcatcaccatgcctggcgggctggattattcccgcgccatcgtggttgcgtccgtaaaagaagcaccaattgggatcgaggtcatccccgcgcacgtcactgaatatctgaacaaggtactgactgaaaccgatcatgccaaccctgatccggaaatcgtggatattgcctgcggtcgctcctctgccccgatgccgcagcgtgtaacagaagaaggaaaacaggatgatgaagaaaaaccgcaaccatcttgcgcaatggcagatgaacaggcaacggctgaaacagtggaaccggatgcaactgaacatcatcaggacacgcagccgctggatgctcagtcacaggtaaatgctgttgatgcgaaatatcagaaactgcggacagaactccatgaagcccggaaaaacattccgcccaaaaatcctgtcgatgcagacaaattactggctgcctctcgcggagaatttgttgaagggattagcgacccgaatgattcgaaatggattcccggtcatcatatctcctcaaatgaagtcaaaaaaacggaaaataaagtgcgacagactgaagataaacagcaccagaacagcgaaccggaggagcgaactgaggtgtactggcaatagcggacactaccatttgttctttttttaagcagccatctgatgatatttttccctgaaggctgccggggagatattccccagacgagagtgacgacgctgacgattgtagaaaatctcaatgtattcccgtattactgagatggcttcatcccggttattaaaacgatagtggctcaggctctcatttttcagcgttccccagaagctttccatcggagcgttgtcgtaacagttacctttacgcgacattgatgttttcagaccagactgctcctgtatgacccggtaatcgtatgcgcagtactgtgaacctcgatcagagtggtggattagcccggcaggtgggcgctggctcctgagcgccataaacagggctttacctgtcagctcttttgtcatgcgctctcccatggcgtagccgacaatttcgcacgtataaacatctttgatgccagcgaggtacaaccatccctcctgtgtggcaacatacgtcaggtccgccacccagacctgatttggtgctgtaggagcgaacgtctggttcagcagatttggcgcaactggcagattgtggttcgagttcgtagtcgctctgaacttgcgtttctgcttacagcgtagccttagctccttacgaagacgtgccagtcggtcacgaccaacgatgatgccattctctgccagctccgtctggagccgccgggttccatatgtttcgcgagtgcggatatgtgccaccttaatctccagttttagccgctcatcactttgttttctgtctgagggttcatgctgtacccagttgtaataaccgctcctggatacaccaaatacctgacacatcgcttcaatgggaaattgttgtcgccattgttcgattaacgcgtatttttcagcgactcctgtgcaaaatacgctgttgctttttttaatatatctcgctcaaggcgagcttcatttaacgccttacgcagttgcagaatttcagattccagttcagccaccgtgcgggaaccaggagtaccgagcccttttctggcggcggtaacccattgtcctaaagtgccttcaggaagagataatcgggaagcgccttcactgatcgaaagttgattttcaggaaccgttctgacagcttcggctttgaactctttagagtaacgttgggtttttctgctcattattagctccttctgatgccattctatttcaggaaggagtgtccgttaaactcaggctacctcaataatgaaactggcgaagatgaactcaactggaaaaaacaggtgttgattgcggcggtttacggtttatgtgcgaatcctgcgtgcatagcctatgcgcctgcaatccctgacatcgcaatgatgattgccaacaagcttgaaaattttggagtgaccagtgatgagcgcttacccgatttttgatcgtattgaagaaatggcatgggctcgccactaccagcagatcgttcgtgaagaaaaagaaacggaactggcggacgacctggaaaaaggtctgcctcagcacctgtttgaatcgctctgcatcgaccatttgcaacgccacggtgccaataaacaggcaatcagccacgcatttgatgatgatgttgagtttcaggagcgcatggcagaacacatccggtacatggctgaaaccattgcccaccaccaggttgatattgatttggaggactaaaatctatggcgctttttcaacgagcaataaacacacaggcctatctaaaagcaggaattatggggtttgctggcgacggcaaaacctacacagcaagcgaactggctattggtctggtaatgcttatgcggcaacggggaattgaagctggtaaccgcccggtaatgtttctggacacagaaacaggctctgactgggttaaaccccgctttgatgcggaaaatatcgaattatttacggcaaaaacccgctcgtttgttgatctgcttgaagccattaatgaagcggaaagcagcggttccgtaatgatcatcgactccatcagtcacttctggaccggattatgcgacgagtatgccagacgccgaaaccgtaaacgaggactggaattttcagactgggcgtggctcaaacaggagtggcgacgctttaccgatcgatttgttaacagtcaggcgcacattattatgtgcgggcgtgcaggatatgagtatgactttttcgaaggtgatgatggcaaacgccagttggcaaaaaccggtataaaaatgaaagcagaaacagaaaccggttatgaaccctccatcctgatccagatggagaagcaaatgaacatagaaaccggtcaggtgtggcgcaccgccagaatactaaaagatcgctccacccgtattgatggacaggtattttcaaacccaacatttaaaaactttcttcctcatatcgagtttcttaacctgggaggtgaacacctcggcatcgatacctcacgggataacagtgaattatttgccaacgacggtacaccgacatggctaaaagaaaagcgtgcaaaagaaatcgcacttgatgaaattatcgagttgttcaacaagcaccatgggggcaccagtaacgacgccaaacgcgcaaaagctgatttgctggaaaaaacattcacctcccgctcatgggaaagaatcaaaggtatggactggccgacaatcaaagctggtcgtaatgcactatggattgaactggaaggcgttgaatatgcattcccggatccacaaacacaaaacgaaacgcaacaagcaggatacgatgagaatattccggtgtaaaaccaagtgcattttggacacggtttttgaaaatattaatggaggtgttcatgtataaaattacagccactattgaaaaggaaggtggttctcctgccagctggacaagatactcaaagacaaaactaacgaaatcagaatgcgaaaaaatgctctcaggggaaaaagaagcaggcgtttccagagagcagaaagtaaaactgataaattttaattgcgagaaacttcagtcctcgtgaattgcattgtattcaaattaaaacttcatagctgattattaataatcaacatcgggcgtcaatttcagcctaacattggcgcctgccagaggtgatgcgatggcacaagtaatctttaatgaagagtggatggttgaatacggcctgatgcttcgcactggtctgggtgccagacaaattgaagcataccgccagaactgttgggtggaaggcttccacttcaaacgagtatctcctttagggaagccagacagtaagcgagggattatctggtacaactatccgaagataaatcagtttatcaaagactcatgatatgtctaaattaccaacaggtgtcgagattcgaggtaaatacattcgcatctggttcatgtttcgaggaaaacgatgtcgggaaacattgaaaggctgggagattactaacagtaacattaaaaaggccgggaatttaagagcgttgatagttcatgaaatcagttccggtgaatttgagtatttaagacgttttccccagtccagcactggggcaaaaatggtgacaacgagggtcataaaaacattcggggagctttgtgatatctggacaaaaattaaagagacagagttaacaacaaacacaatgaagaaaacgaaatcacaattaaaaacactcaggataataatttgtgagagtaccccgatatcgcatattcgttatagcgatatcttaaactaccggaatgaactgctgcatggagaaacgctttacctagataatccaagatccaacaaaaaaggaagaaccgtgcgcacagttgataactatatcgccctgctctgttcgttgttacgttttgcgtatcagtcgggatttatatcaaccaaaccatttgaaggagtaaaaaaattacagcgaaacagaataaagcctgacccgttatctaaaacagaattcaatgcattaatggaaagtgaaaaaggacagagccaaaacttgtggaaatttgccgtttactccgggcttcgtcacggggaactggcagctctggcgtgggaggatgtggatttcgagaagggaattgtgaggtagcctgagtttaacggacactccttcctgaaatagaatggcatcagaaggagctaataatgagcagaaaaacccaacgttactctaaagagttcaaagccgaagctgtcagaacggttcttgaaaatcaactttcgatcagtgaaggcgcttcccgattatctcttcctgaaggcactttaggacaatgggttaccgccgccagaaaagggctcggtactcctggttcccgcacggtggctgaactggaatctgaaattctgcaactgcgtaaggcgttaaatgaagctcgccttgagcgagatatattaaaaaaagcaacagcgtattttgcacaggagtcgctgaaaaatacgcgttaatcgaacaatggcgacaacaatttcccattgaagcgatgtgtcaggtatttggtgtatccaggagcggttattacaactgggtacagcatgaaccctcagacagaaaacaaagtgatgagcggctaaaactggagattaaggtggcacatatccgcactcgcgaaacatatggaacccggcggctccagacggagctggcagagaatggcatcatcgttggtcgtgaccgactggcacgtcttcgtaaggagctaaggctacgctgtaagcagaaacgcaagttcagagcgactacgaactcgaaccacaatctgccagttgcgccaaatctgctgaaccagacgttcactcctacagcaccaaatcaggtctgggtggcggacctgacgtatgttgccacacaggagggatggttgtacctcgctggcatcaaagatgtttatacgtgcgaaattgtcggctacgccatgggagagcgcatgacaaaagagctgacaggtaaagccctgtttatggcgctcaggagccagcgcccacctgccgggctaatccaccactctgatcgaggttcacagtactgcgcatacgattaccgggtcatacaggagcagtctggtctgaaaacatcaatgtcgcgtaaaggtaactgttacgacaacgctccgatggaaagcttctggggaacgctgaaaaatgagagcctgagccactatcgttttaataaccgggatgaagccatctcagtaatacgggaatacattgagattttctacaatcgtcagcgtcgtcactctcgtctggggaatatctccccggcagccttcagggaaaaatatcatcagatggctgcttaaaaaaagaacaaatggtagtgtccgctattgccagtacacctcattgtgaatgtcagaagaaacctgacgatacttgatatgttcggtcccccaaaaacaaatgccgggatccggacggtaacattactgcagccggctcttgaagcactgaaggagcaatacaaactgaccgggcatcatcgcaaaagcgaaatcactttttatcatcgggagtacggcagaactgaaaagcaaaaactgcattttgttttcatgcccagggtgtgtaacgaaaaacagaaaccttattactcggtaagcagtttgggtgcaagatggaatgcagcagtaaaacgtgctggtattcgccgccgtaatccgtaccatacgcgacatacttttgcctgctggctgttgacggcaggagcgaacccggcatttatagccagccagatggggcatgaaactgcgcaaatggtgtatgaaatttacggtatgtggattgatgacatgaacgacgaacagatagccatgttgaatgcgcggttatcgtagttgcaaagtttgcccccaatttgccccatttagtaccagagaactgaaataatgcaagaaaatcaacaaattacaaagaaagaacaatacaacctgaacaaattacaaaaacgtctgcgtcgtaacgtgggcgaagccattgctgacttcaatatgattgaagaaggcgatcgcatcatggtttgcctctccgggggtaaagacagctataccatgctggagattctgcgcaatttgcagcaaagcgcgccaatcaatttttcgctggtggctgttaacctcgatcaaaagcaaccgggcttcccggaacacgttctgcccgagtatcttgaaaagctgggcgttgagtacaagattgtcgaagagaacacttacggtatcgtgaaagagaagattccagagggcaaaaccacttgctcactgtgttctcgccttcgtcgcggtatcctttatcgtaccgcaacggaactgggggcgacgaagatcgcgctgggtcaccatcgtgacgatatcctgcagacgctgttcttaaatatgttctacggcggcaagatgaaaggtatgcctccgaaactgatgagcgatgatggcaaacatatcgttattcgtccgctggcctactgccgcgagaaagatattcagcgatttgccgatgcaaaagcgttcccgattattccgtgcaacctgtgcggttcacagcctaacctgcaacgtcaggtgattgctgacatgttgcgtgactgggataaacgttatccagggcgtatcgagacgatgttcagcgcgatgcagaatgtggtgccgtcgcatctgtgcgataccaacctgttcgatttcaaaggcatcacccacggttctgaagtggttaacgggggtgatctggcgtttgatcgcgaagagatcccactacaaccggcgggctggcagccagaagaagatgaaaatcagttggatgagttacggctgaatgtggttgaagtgaaataaccaggatggcgcccgatgcgcaagcgtatcgggctactcttatggaggccggataagacgcggccagcgtcgcatccggcaatcccgaataagatgtttactcttgcacccggcaattcaacatttcattattttaataaccgcacccggctcgtttttcctttaatcttcccgccctgtaactgtttccatgctttatgagcaacagcctgacggaccgcgacatagacatgcgccggatgcacggcgattttgccaatatctgcgccatcaagcccgatatctcctgtcagtgcacctaatacatcacccgggcgcattttggcttttttcccaccatcgatacacaacgttgccatttctgcttccagcggcacaatggaactattagctggcggcgtttgccagttaagttttatctgcaacatgtcagaaatgatattggcccgctgtgcttcttccggagcacagaaactgatcgccagaccgctatttcctgcacgagctgtacggccgatgcgatgtacatgaacttcagggtcccacgccagctcaaagttcaccaccagctcaagcgatttaatatccagaccacgcgcagcaacatcagtcgcaaccagtacacgggcgctaccgttagcaaaacgtaccagggtctgatcgcgatcgcgttgctccaaatcgccgtgtaatgacaatgcactttgccctacttcattcagcgcgtcgcagacagcctggcaatcttttttggtattgcaaaacaccacgcaagaggatggctgatgcaagcttaataaccgttgcaacagaggaattttgcctttgctggatgtctcataaaattgttgttcaatgggtggcaaagcatctgttgagtcaatttcaatcgccaaaggatcgcgttgcactcgtccgctgattacggcaatggcttccggccaggttgccgaaaacagaagcgtctgtcgagatgcaggcgcaaaacggatgacatcatcaatggcatcgctaaatcccatatccagcatgcggtcggcctcatccatcaccaaagtattcagcgcatccagtgataccgtgcctttttgcaagtgatccagcaaacgacccggcgttgccacgataatatgcggcgcatgttgcaacgaatcacgctgcataccgaacggttgaccaccgcacaacgtcaaaattttggtatttggcagaaaacgcgccagccgacgcaattcacctgccacctgatccgccagttcacgcgtaggacacagcactaaagcctgggtttgaaatagcgacgcatcaatttgctgtaacaagccgaggccaaaagccgccgttttgccgctgccggttttcgcctgcacgcgaacatcttttccggcaaggatcgccggaagcgcggcggcctgcaccggcgtcatagttaaataacccaactcattaaggttcgtgagttgggcgggaggcaaaacattcagggtagaaaaagcggtcacaatctattctcgtggtcatcgacgcaaagttagcaggcgcgtatcctcgcagatctacgctcacgatgcgacaatttaatcggttcttcatcgggtggtgggtcaggcatgggttgcgggcgagggatcggatcgggcactggaacaggatcgccaggaatcggttcagggacaggaatttgcaaataaataagtgtcgtcatatttccctccggtcattgggtggactcttaaagggtagacgctgataaataacaggcaaaaaaaagccgactcatcaaagtcggcgtcgtacgaatcaattgtgctatgcagtaattcaaaaaaggaagtaagacaatatggagcgcaacgcccatcgcttgacgttgcattcacctgcaagggagatattgccctgaatgggtagagagtttattgacttcgctcaaactttgcggcgtttttgtatacagacagccggaaaaattgcttttgttacaaccatttactacggtgcaaccataaagcaacaccaccaataagaacaactaacagaatacaaaaaattgaaaatccgaattgccacccgccgccagggatcccaccaaggttgacgccaaataacccggtcagaaaggtactgggtaaaaagaccattgccatcaacgacattgtataggtacgacgagctaaattttcctgcatcacctgagcgatttcatccgccatcacgccagtccgtgctatacaggcgtcgatttcgtcaaggccgcgcccaaggcgatcggcaatatcctgcatccgacggcgttggtcatcgctcatccacggcaaacgttcactggcaagacgagcataaacatcacgttgcggtgccatatagcgacgcatcacaattaattgtttgcgcagcagagccaggaatccacgcggtggaatttgctgatcaaggagattatcttcaaggtcgataattttatcgtgcagctgctcgataaattcgctggaatgatcggtcaacgcatcgcacacatccaccagccaccctccgcaatcggtcggacccgtgccctcttccagatcgctcaccacatcgtccagcgccagcactttgcgttgtcgggtcgaaacaattaaccgcccgtccatatatacacgcatggcgaccagttgatcggggcgttcatcggtgctgccgtttatacagcgcaatgtaatcagcgtgccttcaccgagacggctgactcggggccgcgtgctctcgcccgccagcgcatcacgtacgttattgggaagcagcggtgttgtcgccagccattgggcgctatcatggtgtacataattaaggtggagccagcagggatgcgcttcatcaatcacatctgtattttccagcggtttaacgccgcctctaccatccagcatccaggcaaatactgcatccgggacattaacgtccgatcccttaatcgcttccacagtgcctccatcatcaacgcattattttgtagtctagccttctggccctgttacgcaacatctcatcaccccattaccctgaaatgattaataaaattctgtctaaattgaatacaaaaagcaaaatgcttttccgtatacaaaccgtgtgaagtgttaaatagcgtctatcattatcagaattatctgatcatatgacgtggcttttttgcgatcggatagcaacaaaaattgataaaaataacgggatctcaatgattacgcacaacttcaataccctggacttactcaccagtcctgtctggatcgtttcgccctttgaggaacagttaatttatgccaatagcgcggcgcgactgttgatgcaagacctcacgtttagtcagctacgaaccggtccctattccgtctcctcacaaaaagaactgccgaaatacctctccgatctgcaaaaccaacacgatattatcgaaatcctcactgttcagcgtaaagaagaggaaacagcattaaactgtcggcttgttttgcgaaagctgacagaagcagaaccggtgattattttcgaaggtatcgaagcgtcggcaacgctgggtttaaaagccagtcgctcggcaaattatcagcgcaaaaaacaaggtttttatgcgcgcttttttctgactaactctgcaccaatgttgttgattgacccctcacgagatggccaaatcgtcgatgctaacctcgccgcgctcaatttctatggttataaccatgaaacgatgtgccagaaacatacctgggaaataaatatgctcgggcgtcgcgtcatgcctatcatgcatgaaatttcgcatttacccggtggtcataaacctctgaattttattcataagctggcggatggttcgactcgtcatgtgcagacctacgccgggccgattgaaatttatggcgacaagctcatgttatgtattgtacatgatattactgagcaaaaacggctggaggagcagctggaacatgctgcccaccatgacgcgatgaccggattactgaatcggcgacagttttatcacattaccgagccaggccaaatgcagcatctcgccatcgcccaggattacagcttgttgctcatcgacaccgatcgttttaaacacattaacgatctctatgggcattctaaaggtgatgaggtgttatgcgccctcgcccgcaccctcgaaagttgcgctcgcaaaggcgatttggtgtttcgttggggaggcgaagagtttgtcttattgctaccaagaaccccactggataccgcgctttcgctggctgaaactatccgcgtaagcgtggcaaaagtgagtatttcgggcttaccacgctttaccgtcagcattggtgtggcgcatcacgaaggaaatgaaagcatcgatgaactgtttaaacgcgttgatgatgctttgtatcgggcgaaaaatgatggacgcaaccgcgtgctggcggcataagccgcggatgcgtctcgagatcaacgactgcgcttagcgtggcgctcccagttttcttgcttcgcctgcgccgttttacgtagtgcgacgtaacacgccccgctgccgccatgatgcggtagcgcagtgcaatatgcctgaacatcatcaaattcggtcagccagcgcgccacatagctgcggacaatattggcatgcgatttatcatcccgtcctttgccatgaataatcagcacgttacgcaaaccatcagccatggcttgttgaatgaaactgaacatcattttgcggcactcttccaccggctggcgcaaaagattcaggctcgcctgttgcggatatttaccactgcgcagcttatccagcaccccatgttgcaacccttcccgccgaaactccagcggctgacttagtgggatgatgtcgagaaatccggtggtgaggaaattatcaagctgcagcgtgtcgatacgctgcggcgcacgttggttacgcgttggatgccagtggacatcggtagcacgtttcagcggctggacatcttccatggcgtcaagaaacagcgatttgtcgtcaaggttcatgttacatcctcccgcaattaagagcgcgatatgataaccagaccgggtcggtccaacaacgtattacccaaaattccagtaataagttccaaatattgccgatattttaagcaaaatgcttatgcatgattattcattcacgatattaataatgtaacttatattttcgtgaaatctgtcactgaagaaaattggcaactaaaggttaaaaccgttataacacagtcaccggcgcagaggagacaatgccggatttaagacgcggatgcactgctgtgtgtactgtagagtctggcggatgtcgacagactctatttttttatgcagttttaactttgcagatagccgcattctcgccggaattgcgtgattaatgacgcggtcagtggtgtctggcgactatcacgccgctgaatcaaataataggccgctttcggtaaaatttcgctaaccggcaacatcaccagcccctgtccgtgcaagggatcgcagcccatttcttcaggcagtatgctgagaaaatcgctttttgccaccagactgatacaggctgagaacgtctcgcagactacaccgacctgtggcgtttgcgcctgatcgtcaagcaattcactcaactgtttgtagtaactgccgtgtggcgtcggcattgtccagctgtaatccagtaactgtttgatcgaacgggcaccaatagcggggtgtcccgggcggcaaaagatcgcgaattgcttttccagtaatttctcaaaagtaaattcgtggtcgtacggtccctgataataggtattgatggtgaaatccaattctccctgacgcaattcattaatcatcgacaccagttgcccttccataatgcgtacttttacctgcggatgctgctgatgaaaacgagatatgacagctggcatcagactgcgggaaatactggcccccatgccgatattaatctgccctgccagttgcccttgtcgttggcgaatatcctcttgggctgcgcgcagctcttcaagaataagactggcgtgctgataaaaactttcaccggcatcagttaacgtcacgcctttactacggcgaaaaaagagttgcgccgctaatccttcttccagctcctgaatagatttactcagtgccggttgcgacatattcaacattcggctcgctccgcgaatgctgccctgacgagccacttcaacaaaagcccgaatttgatgaatttttacctgaaaagccatgacgccaccgataaccgttatttatcagaccaaagaaactggcatctactttaatgcagatgattgtgtcagggtaatttatgaacggttaaaactgtgaaaaatcagttagtgataagtaaaaactatcgctacgtgaaccgggtcacactttttactgatgacgggaaaggttatggagtctttgaatcaatttgttaattcgcttgccccaaaattatcgcactggcgacgtgattttcatcactatgcagagtctggctgggtggaattccgcactgccacccttgttgcggaagaattgcagcagctcggctattcactggcgctgggccgcgaagtagttaatgaaagtagccggatgggactacctgatgaactcactctacaacgcgaattcgagcgcgctcgtcaacagggtgcgctagcacaatggattgcggtttttgaaggtggtttcactggtatcgtcgccaccctggataccggtcgccccggtccggtgatggctttccgtgtcgatatggacgcgctggatctcagtgaagagcaggatgtcagccatcgcccctaccgcgacggttttgcgtcatgtaacgccggaatgatgcatgcctgtggtcatgatggacataccgccattgggcttgggctggcgcatacccttaaacaattcgagtccggactacatggcgtcatcaaactgatttttcagcctgcagaggaaggtacgcgtggcgcgcgggcgatggtcgatgcaggtgtcgtagatgatgttgattattttactgccgtgcacattggcactggcgtacctgcgggcaccgtggtgtgcggcagtgataattttatggcaaccaccaaatttgacgcgcacttcaccggtaccgccgctcacgcaggcgcaaaaccagaagacggtcacaatgccttgttggcggcagcacaagccactcttgcactgcatgcaatcgccccgcacagcgaaggagcttccagagtaaacgtgggcgttatgcaggcaggaagcggtcgtaacgttgttcctgcctcggcgttgctgaaagtggaaacacgcggggccagcgacgtcattaatcaatatgtttttgaccgtgcacaacaagcgattcagggcgcagcaaccatgtatggtgtcggcgttgaaactcgtctgatgggtgcagctaccgccagttctccttcgccgcaatgggtcgcatggttgcaaagtcaggcggctcaggtcgcgggggtcaatcaggccattgaacgtgttgaagcgcctgcgggttccgaagatgccacattaatgatggcccgcgtgcagcaacatcaagggcaagcctcctacgtggtgtttggcacacagctggcggcaggtcatcacaacgaaaaattcgattttgacgagcaggttctcgctattgccgtcgaaacgctggcgcgcaccgcgctcaattttccctggacgcgaggtatctgatgcaggaaatctatcgttttatcgacgatgcgattgaagccgatcgccaacgttataccgatattgccgatcaaatctgggatcatccagaaacacgttttgaagagttctggtcagcggagcatctggcttcggctctggaatctgcaggcttcaccgttacccgcaacgtaggcaatatcccaaatgcctttattgcttcgtttggtcaaggcaaaccggttatcgccctgctgggagaatatgacgccctggcaggtttaagtcagcaagctggttgcgcgcaacctacatccgcgacgcccggtgaaaatggtcacggttgcggacacaatttgcggggaaccgccgcctttgccgctgcaatagccgtcaagaaatggctggaacaatatgggcaaggcggcacagtgcgcttttatggttgtcctggcgaagaaggcggctcgggtaaaacgttcatggtccgcgagggggtatttgatgatgtggatgcggcactcacctggcacccggaagcctttgccggtatgttcaatacccgcacgctggcaaacattcaggcatcatggcgctttaaagggatcgcagcacatgccgcgaattcccctcatttgggacgcagcgcccttgatgccgtaacgttgatgaccactggcaccaacttcctcaacgaacatattattgaaaaagcgcgcgtacactatgccatcacaaatagcggcgggatctcgcccaacgtggtccaggcgcaggcagaagtgctttatcttatccgcgcccccgaaatgaccgacgtgcagcatatttatgatcgggtcgccaaaatcgccgaaggtgcggcattgatgaccgaaaccacggttgaatgccgcttcgacaaagcctgttccagttatctcccgaatcgcaccttagaaaatgccatgtaccatgccctatcccattttggtaccccggaatggaactccgaagaactggcttttgcgaaacaaattcaggctacgctcacccccaacgatcggcaaaacagtctgaataatatcgccgcaaccggtggcgaaaacggcaaggcttttgcactacgtcatcgtgaaacggtactggcgaatgaggtcgctccatatgccgccaccgataacgtgcttgcggcatcgactgatgtcggcgacgttagttggaaactgcctgttgcccagtgtttcagcccctgttttgccgtcggtacaccgctacatacgtggcaactggttagccaggggcgaacatctattgctcataaaggaatgctgctggcggcgaaaactatggcagcaaccacagtcaatctcttcattgattcagggctattgcaagaatgccaacaagagcatcagcaagtaacggacacgcaaccgtatcactgccctatcccgaaaaacgtgacaccgtcacctttaaaataacaacaacaacgcaaacacaacaaccgaggaatgcccatgagtatgtcatccataccgtcgtcctcccaatccgggaagctctatggctgggtcgaaagaattggtaacaaggttctccatccttttttgctctttatctatttgattatcgtactcatggtgacgacggcaattttgtcggcctttggcgtcagtgcgaaaaacccgaccgatggaacgccggtggtggtgaaaaacctgctcagtgtggaaggattacactggtctttacccaatgttattaaaaactttagcggttttgctccacttggtgcgatcctggcgctggttttaggtgccggtctggcggagcgcgtcggcttactgccagcgctaatggttaaaatggcatcgcatgttaatgcccgctacgccagttatatggtgctgtttattgcttttttcagccacatttcttccgatgcgacgttagtgatcatgccaccgatgggtgcgctgatttttctggcggtgggcaggcatccagttgcaggtttactggctgccattgcaggcgtaggttgcggctttacggctaatttactgattgtcacaaccgacgtgttgctgtcggggatcagcacggaagcggcggctgcgttcaatccgcaaatgcacgtcagtgtaattgataactggtattttatggccagctccgtagtcgtactgacgattgttggcggcctgataaccgacaaaatcatcgagccacggttaggtcaatggcagggaaacagcgatgagaaactgcagacattgaccgaaagtcagcgttttggtttacgcatagcaggtgtcgtatcgctactttttattgctgcgattgcgctgatggtgatcccggaaaacgggatattgcgcgatccgattaatcacaccgtgatgccatcaccctttattaaaggtatcgtgccactgatcattctttttttctttgttgtctcgctggcttatggcatcgctacccgcacaattcgacgtcaggcggatttaccgcagttaatgattgaaccgatgaaagagatggcaggatttatcgtgatggtttttcccctcgcccagtttgtcgccatgtttaactggagcaacatggggtgaggtagcctgagtttaacggacactccttcctgaaatagaatggcatcagaaggagctaataatgagcagaaaaacccaacgttactctaaagagttcaaagccgaagctgtcagaacggttcttgaaaatcaactttcgatcagtgaaggcgcttcccgattatctcttcctgaaggcactttaggacaatgggttaccgccgccagaaaagggctcggtactcctggttcccgcacggtggctgaactggaatctgaaattctgcaactgcgtaaggcgttaaatgaagctcgccttgagcgagatatattaaaaaaagcaacagcgtattttgcacaggagtcgctgaaaaatacgcgttaatcgaacaatggcgacaacaatttcccattgaagcgatgtgtcaggtatttggtgtatccaggagcggttattacaactgggtacagcatgaaccctcagacagaaaacaaagtgatgagcggctaaaactggagattaaggtggcacatatccgcactcgcgaaacatatggaacccggcggctccagacggagctggcagagaatggcatcatcgttggtcgtgaccgactggcacgtcttcgtaaggagctaaggctacgctgtaagcagaaacgcaagttcagagcgactacgaactcgaaccacaatctgccagttgcgccaaatctgctgaaccagacgttcgctcctacagcaccaaatcaggtctgggtggcggacctgacgtatgttgccacacaggagggatggttgtacctcgctggcatcaaagatgtttatacgtgcgaaattgtcggctacgccatgggagagcgcatgacaaaagagctgacaggtaaagccctgtttatggcgctcaggagccagcgcccacctgccgggctaatccaccactctgatcgaggttcacagtactgcgcatacgattaccgggtcatacaggagcagtctggtctgaaaacatcaatgtcgcgtaaaggtaactgttacgacaacgctccgatggaaagcttctggggaacgctgaaaaatgagagcctgagccactatcgttttaataaccgggatgaagccatctcagtaatacgggaatacattgagattttctacaatcgtcagcgtcgtcactctcgtctggggaatatctccccggcagccttcagggaaaaatatcatcagatggctgcttaaaaaaagaacaaatggtagtgtccgctattgccagtacacctcagggaaattcatcgccgtggggctgaccgatatactggaaagttcagggcttagcggcatcccggcgtttgtcggtctggcgttgctttcctctttcttatgcatgtttattgccagcggttccgcaatctggtcgattctggcccccattttcgtaccaatgtttatgctacttggctttcacccggcatttgcgcaaatcctctttcgtattgccgactcatccgtattgcctttagcgccggtatctccttttgttccactgtttcttggattcctgcaacgctacaaaccagacgcgaaactgggtacttactattcgttagtcttgccctatccgcttatctttttggtggtatggctgctgatgttgctggcgtggtatcttgttggtctgccgataggtccggggatttacccacgtttgtcttaagagagaacggatgctgagattacttgaagaaaaaattgccacgccactgggtccactgtgggtgatttgcgatgagcaatttcgcctgcgggcggttgaatgggaagagtacagcgaacgcatggtgcagctgctggacatccattatcgcaaagaaggctatgagcgcatttctgccaccaacccaggcggtttaagcgacaagcttcgtgattattttgccggtaatcttagcattattgatacgcttcccactgccacaggggggacgccatttcagcgcgaagtctggaaaactctacgcactatcccctgcggacaggtaatgcattacggccaactggctgaacaattgggccgccctggcgcggcgcgtgccgttggtgcggcaaacggatcgaatcccatcagcatcgtcgtaccttgccatcgggttattggccgaaacggcaccatgaccggatatgcaggcggagttcagcgaaaagagtggttattgcgccacgaaggttatcttttgctgtaaacattaaacaatttgtgccagcttgttcacacttttatgtaaagttacccttaacaacttaagggttttcaaatagatagacatatatttacatctaatatcggaattctctgctgttaaggtttgcttagacttacttgctccctaaaaagatgttaaaattgacaaatatcaattacggcttgagcagacctatgatcccggaaaagcgaattatacggcgcattcagtctggcggttgtgctatccattgccaggattgcagcatcagccagctttgcatcccgttcacactcaacgaacatgagcttgatcagcttgataatatcattgagcggaagaagcctattcagaaaggccagacgctgtttaaggctggtgatgaacttaaatcgctttatgccatccgctccggtacgattaaaagttataccatcactgagcaaggcgacgagcaaatcactggtttccatttagctggcgacctggtgggatttgacgccatcggcagcggccatcacccgagcttcgctcaggcgctggaaacctcgatggtatgtgaaatcccgttcgaaacgctggacgatttgtccggtaaaatgccgaatctgcgtcagcagatgatgcgtctgatgagcggtgaaatcaaaggcgatcaggacatgatcttgctgttgtcgaagaaaaatgccgaggaacgtctggctgcattcatctacaacctgtcccgtcgttttgcccaacgcggcttctcccctcgtgaattccgcctgacgatgactcgtggcgatatcggtaactatctgggcctgacggtagaaaccatcagccgtctgctaggtcgcttccagaaaagcggtatgctggcagtcaaaggtaaatacatcaccatcgaaaataacgatgcgctggcccagcttgctggtcatacgcgtaatgttgcctgatttttccgcataactcactatccttctgtcatatcattaaatttttctgatttattgatctggcagaaggttcatcactgtttcattcaccagatatgggttaatcttttaattacaaactgcgttgacagttgttgtaaggagaccctgtatggctatgtatcagaacatgctcgttgttatcgatcctaaccaggacgaccaaccagcattgcggcgagctgtttatttacatcaacggattggtggcaaaattaaagcctttttgccgatctatgacttctcatacgaaatgaccaccctgctctccccggacgaacgtaccgctatgcgtcagggcgtcatcagccagcgtacagcctggatccacgagcaggcaaaatattatctcaatgctggcgttcccattgaaattaaagtggtctggcataaccgtcccttcgaagccatcattcaggaagtgatcagcggcgggcacgatttggtgctaaaaatggcgcaccaacatgaccgtctggaagcggtgatttttacgccaacggactggcatctgttacgcaaatgcccaagcccggtgtggatggtgaaagaccagccgtggccggaaggaggtaaggcgctggtggcggtgaatctcgccagtgaagagccgtatcataatgcgctcaatgaaaaactggtcaaagagacgatcgaactggcagaacaagtcaaccataccgaagttcatctggttggcgcttacccagtaacgccaattaatatcgcgattgaactgccggaatttgatccgagcgtttataacgatgccattcgtgggcaacatttgctggcaatgaaagctctgcggcagaaattcggcattaatgaaaacatgacgcacgtagaaaaaggtctgccggaagaggttattcctgatttggcggagcacttacaggcggggattgtggttctgggcacggtaggacgcaccggtatttcagcagcattcctcggcaacacggcggaacaggtgattgatcatcttcgctgcgatctgttggtcattaaacctgaccagtatcagacacccgttgaactggatgacgaagaagacgattaacgactcttcaataactgacaaggcccgagttatcgggcctattttttacttactgctcttcgccgccaaggaaataaattcccaacgggattgccagcaacacagtaaagaccaggctataaacaaaaatcatcgatgactgaatcacatacattgatgtcgtccactcagacagcggaatattgtactgttctataacgccgccgatagtcgcgcgagtcacaaccgacgccgcaataatgaaaaccgccaacaaaccaaagagaaattttttccctttcgctgacttcagtttcgccataatcatgatgtaatccttgtgcagacaaatttcttgttacctaaacgtaacaataccatgacatttcaccgttgtctgctctgaaaacctcacctcttagctggatttacaatcaacgcattgattagttagctaatgttgctacttccttccctgactattgatgatctgaatgaattgtcgcggtaaaatagccccgccaggggtttccggcatgacgacaattatctggaggagcctgataaaacaatgatcgctgaactgtttacaaataatgcgcttaatctggtcattattttcggtagctgcgcagcattgattctgatgagcttttggtttcgccgcggaaatcgtaaaagaaaaggttttttattccatgcggtgcaatttttaatctacaccataattatcagtgctgttggtagcattattaaggtaatgactccaacttattgatagtgttttatgttcagataatgcccgatgactttgtcatgcagctccaccgattttgagaacgacagcgacttccgtcccagccgtgccaggtgctgcctcagattcaggttatgccgctcaattcgctgcgtatatcgcttgctgattacgtgcagctttcccttcaggcgggattcatacagcggccagccatccgtcatccatatcaccacgtcaaagggtgacagcaggctcataagacgccccagcgtcgccatagtgcgttcaccgaatacgtgcgcaacaaccgtcttccggagactgtcatacgcgtaaaacagccagcgctggcgcgatttagccccgacatagccccactgttcgtccatttccgcgcagacgatgacgtcactgcccggctgtatgcgcgaggttaccgactgcggcctgagttttttaagtgacgtaaaatcgtgttgaggccaacgcccataatgcgtgcagttgcccggcatccaacgccattcatggccatatcaatgattttctggtgcgtaccgggttgagaagcggtgtaagtgaactgcagttgccatgttttacggcagtgagagcagagatagcgctgatgtccggcagtgcttttgccgttacgcaccaccccgtcagtagctgaacaggagggacagctgatagaaacagaagccactggagcacctcaaaaacaccatcatacactaaatcagtaagttggcagcatcaccgcattattaattatgttatagaaaactataaactcaaatttatcaccccagacgttatcgattttatctgtacgtccctgattgcggttattctgacgattaagctatttttgctgattaatcagtttgaaaaacagcagattaaaaaaggtcgcgatatcaccagtgcgcggattatgtcgcgcattatcaaaatcaccattattgtggtgcttgttctgctttatggcgaacatttcggcatgagcctttctggcttgctgacctttggtggtattggtggtctggctgtcggtatggccggtaaagatattctgagtaatttcttttccgggatcatgctctatttcgaccgtcctttcagtattggcgactggatccgttcaccggacagaaatatcgaaggtacagtagcggaaattggctggcgaattaccaaaattacgacctttgataatcgtccattgtacgtaccgaactcgctgttttcgtcgatcagcgtagaaaacccaggacgaatgaccaaccgccgcattaccacgaccattggtttacgttatgaggatgcggcaaaagtgggcgttattgtcgaagccgtacgtgagatgctgaaaaatcacccggccatcgaccagcgacaaaccttactggtttatttcaaccagtttgccgactcgtcattgaatattatggtttattgctttaccaaaaccacggtatgggctgaatggcttgctgcacagcaagacgtttatttgaagattatcgatattgtgcagtcacacggcgcggactttgccttccccagccagacgctgtatatggataacattacaccgccggaacaggggcgctaaatcagacatcactggcgttatccacaagggtaacgccagttcccatcacatcaatgcttcacaatatacatagtccggctgtacgccacatcttccgggttattaatgggataacctttcagccacggcttgattaatcgtccattggtatattgataaattggtgcaatcggtgcttgctccatgaggattttttctgccgcgttgtaatcggcattacgcgctttaacggtattttccgtcgatgcctgggccagaactttgtcgtatgccggattgttaaagcgtgaaatatttcctgaatgcgttgacgttaataatgtcaggaaagtggagggttcattataatcccccacccatgaggcgcggataacatcaaaattgccggtgttacggctatcgatataggttttccattcctgattttgcaatttaacatctacgccaaggttctttttccacatcgatgctacagcaatcgcaattttttgatggttttctgaagtgttatacaaaagcgtcagcttcagcggtttttgcggaccataaccagctgcgctcaacaaagtttttgcctgcgcattcagttcttcctgactcatttgttcaaacggcgaaggttccggcgtaaatccggcggtaacatctggtgtaaaatgccacgctggcttttcgcccgtccctaatactttttcggtcatcaggcggcgatctatcgtcatacttaatgccagacgaacgcgctgatctgccgtcggccctttttgcgtgttaaacgcataataataggtcccgagctgcggcggcgtataaacctgccccggaatatccttcaacagcttctgatacatatttttcgggaaggattcggtgatatcaatatcccccgcgaggtaacgcttagtggctgcggattcctgattaattggcaggaaggtcactttttgcagtaccgttttggcgttatcccaataatgggtattcggtaccacgaccagtttttcattgactacgcgatctttaagaacataagcgccattgccgatcagatttccgggtttcgtccactctttaccgctttctacgttggctttttgcaccgggaagaaggcaaagttagcggttaaattcacaaaccacggcaacggtttatcaagctgaattttcaaagtatgggcatcaactgcggtgacgccaagctggtctggcgtagctttaccatcaataatcgcctgtgcgttgttgattcccgccagcgcggcaaaccatgcaaatggcgatagcgttttcgggtccaccagacgctgccagctgtagacaaaatcttgcgccgttaccggtgtgccatccgcccattttgcgttatcgcgcagggtaaaagtccagatacggttgtcattacttttccactgagtcgcaacgccggggacaatctcccctttctcgttctgattcaccagtccttcaaacagatcgcgaatgacctgaatctctggcaggcccacggctttagcgggatccagcgacgcaggctcatctttaatgtggcgcaccagctcctgcttctctgccagtactgtgccgctcggaacttctgcagcatacgaaagagaaatgctgctgaccaacagcgcacaacacgtgactgaaacagagtgcttcataagtttccctctaaccgacattaaaattgatgcgtaattatttgtttcgccttaaagaaatgcaaacaacttccatcaaaaaagtgacacagggagcataaaatgttttatgtatcaatatattaaatcagatttagtgtaaataatagacgacaaaatgcggtaaagcacatagaacaccgaacactacgttcaggcttcgcacgttcaaaccagttttcggtatcataatcagcatctgtcgccattgtacgaagaataaaaaataaccaaaacgttgaaaggaactgagaatacgttaagagaaaaattaaattaatgtatcagcaagtagtgctaaacagcacctttatacttcagcctatctataaataatgagaatgccgagccagcatgtcgacggtgtggatagtacaggtgataaccgggtaaatctggtgtgaatttatccaaaacacgtatcagttttttttctttaatagcccgctcaacctgatcataaggtagatacgccaatccatgcccatcaattgcagcatcaatgatcaggtctatcgtattcagtaaaagctgaccttccatgcgaacacgaacttcacgtccaccgcgtattaatctccagcgatttgctgtacccgatgtgggaagatacaaattaattgcctgatgatctattaattgtgacactgacgttggaacacttcggcgagaaaaataatccggtgagccaacaatagccattggtatatctggcccgattcgaatggcgatcatatctttatccatctccccacccagacggacgcctgcatcaaaacgttcagaaacgacatcggtcaaaccataatcaatggtgagctgaatatcaatttcaggatgcgatttcaggaatgtgcgcattgctggtaacaatatcgttttggctgcatgttctacagtagtaatacgtattgtcccggatgggcggttctgcagctcgctcagggatgccagggctgaatctatgtcatgcaacatagggccaagaacagacaaaagatgctcgcccgcttcagttggaacaacgctgcgcgtggttcgcgtcagaagccgcaatcccaatcgttcttctatacgacgcactatctggcttaaagctgactgcgccatgctcaggcgggctgctgcacgagtgaagctacgctcctctgcaacgacgacaaacgccatcagatcagcgatttcttcacgcttcattcagtatctccatgcaatctattaatcatttaaatgataggtctaatcataattttgggtctaatcaacttaatgatcaatatctatagtgatatcaccaaccgttaaaacgaaccgacaactccatgaggaacggaatgatgaataataaagtcagcttcactaacagcaataatccaaccatctctttgtctgcagtgatctatttccctccaaaatttgatgaaacccgtcagtatcaggcaattgtggtatctcacccaggtgggggcgttaaagaacaaacggccggaacctatgccaaaaaactggcggaaaagggatttgtcactattgcttatgacgcatcttatcaaggtgaaagtggcggcgagccgcgtcagttagaaaacccatacattcgtactgaagacatcagtgccgtgattgattacctgacaacgctttcttatgtcgacaatacccgaattggtgcgatgggaatttgtgccggtgcaggatatacagccaatgctgcaattcaggatcgccgcatcaaggccatcggtaccgttagtgcggtcaatattggttcgatgttccgtaatggttgggaaaacaatgtgaaatctattgatgccctgccatacgttgaagcgggttcaaacgcccgaaccagcgatattagcagcggagaatatgccgttatgccactggcaccaatgaaggagtccgatgcgccgaacgaagaactgcgtcaggcctgggagtattaccacacccctcgcgcgcagtatccaacagcaccgggttacgctactttgcgcagccttaaccagattattacctttgatgcttaccatatggcggaagtgtacctgactcagccgatgcagattgtggcgggcagccaggcagggagcaaatggatgagtgacgacctgtacgatcgagcatcaagccaagataaacgctatcacattgttgaaggcgcaaaccatatggatctttatgacggcaaagcctatgtggctgaagcaatttcagtattagctccgttctttgaggaaactctgtaatgaaacatattcaaatccgcaatagtgatatggcctggtggatttgcccctatatttccagacatctgttatcacttaacccattacaagcccgctgccgcagatattcccgtggcgagcgataacccagcgcactatgcggatgccattcgttataatgctcgaacgcctctgcaaggttctttgctgccgttaacccgtctggtttgggcatgatactgatgtagtcacgctttatcgttttcacgaagctctctgctattccgttactctccggactccgcaccgccgtgttcttcggttcaagtcccaacatccgggcgaactggcgtgtttcattagcccggtagcatgaaccattatccgtcagccactccactggagacgacggaagatcgttgccgaagcggcgttccaccgctcccagcatgacgtcctgtactgtttcactgttgaagccgccggtagtcaccgcccagtgcagtgcctcacgatcacagcagtccagcgcgaacgtgacacgcagtctctctccgttatcacagcagaactcgaacccgtcagagcaccatcgctgattactttctttcacggccactctgcctgtatgtgcccgtttcgatggcggtacagcaggttttcgctcaagcaacagcgcattctggcgcatgatccggtaaacacgtttggcattgatcgcaggcataccatcaagttctgcctgtctgcgaagcagcgcccatacccgacgataaccatacgtgggcagctctccgataacatggtgtatacggagaagcacatccgtatcatcagtgtgacgactgcggcggccatccatccagtcatcggttcgtctgagaatgacgtgcaactgcgcacgcgacacccggagacaacggctgactaagcttactccccatccccgggcaataagggcgcgtgcgctatccacttttttgcccgtccatattcaacggcttctttgaggagttcattttccatcgttttcttgccgagcaggcgctggagttctttaatctgcttcatggcggcagcaagttcagaggcaggaacaacctgttctccggcggccacagcagtaagacttccttcctggtattgcttacgccagagaaataactggctggctgctacaccatgttgccgggcaacgagggagaccgtcatccccggttcaaagctctgctgaacaattgcgatcttttcctgtgtggtacgccgtctgcgtttctccggccctaagacatcaatcatctgtactccaatgactagtctaaaaactagtattaagactatcacttatttaagtgatactggttgtctggagattcagggggccagtctacctggcatattgctgccaatattcagtttccaccaaattttgatgagtcaaaacagtatccggcgattatcagcgtccatccttttggcagttgtaaggagcagacgtctggcaatatctatggcaaggcattggctgaaaaaggctatctcgttctcgcttatgacgccagtttccagggagaatctggtggggagcctcgctggatagaagatccgacacagcgcgtagaggatattagccgtgttatcgattatgcagtaactctgccatatgttaatgctgaacgtattggcgtgctgggagtgtgtgggggtggtggctatgccattaatgccgcgctgacagaaaaacgaattaaagcagtagtgagtattacgggtgttaatatcgggcgtctttttcgggaaggtttcagcaattacgatccgattggcgcattgggtgatgctgccaacttactgatttagtgtatgatggtgtttttgaggtgctccagtggcttctgtttctatcagctgtccctcctgttcagctactgacggggtggtgcgtaacggcaaaagcactgccggacatcagcgctatctctgctctcactgccgtaaaacatggcaactgcagttcacttacaccgcttctcaacccggtacgcaccagaaaatcattgatatggccatgaatggcgttggatgccgggcaactgcacgcattatgggcgttggcctcaacacgattttacgtcacttaaaaaactcaggccgcagtcggtaacctcgcgcatacagccgggcagtgacgtcatcgtctgcgcggaaatggacgaacagtggggctatgtcggggctaaatcgcgccagcgctggctgttttacgcgtatgacagtctccggaagacggttgttgcgcacgtattcggtgaacgcactatggcgacgctggggcgtcttatgagcctgctgtcaccctttgacgtggtgatatggatgacggatggctggccgctgtatgaatcccgcctgaagggaaagctgcacgtaatcagcaagcgatatacgcagcgaattgagcggcataacctgaatctgaggcagcacctggcacggctgggacggaagtcgctgtcgttctcaaaatcggtggagctgcatgacaaagtcatcgggcattatctgaacataaaacactatcaataagttggagtcattaccggcgcattgaatgcaatggcgtcgcaacgaaccaaagaggctcgtggtggagaattacagatcaacgaattacttcccgccagcctggatgcagcaaaagcccatggactgaccgaacgcgatgtttatgaagcaactgactactataaaacaccacgcgggcaacaaccgggaggtgcgacaaaaatgttgttctcacatgcacagaaaacgctggcctgggatgccttcgcatttactgaagtgttactgactcagccggtgatggtagtagttggtgaaaaagtcggtgccttcggtgcttatcgtgatggactggaagtctatggccgggcgatggtttcgcaggatcgtcagttagtttcattacccgatttctcacattatgaactgtatgacaaaccggaagcagttcaggaggcgctggaaaaagttattccttttttcaacacccatctgggataagtttcatgagaaatattatgaaaaatgtactgattcttggtgctggcggtcagatagcccgccatgtgattaatcaactggcagataaacaaaccattaaacaaactttatttgcccgtcagccagcaaaaatccacaaaccctatccaactaatagcaagattattatgggagatgtactgaatcatgcagcactgaagcaggccatgcagggacaggacgttgtgtatgccaaccttacgggggaagatttagatattcaggcaaattcagtgatcgctgcgatgaaagcctgtgatgttaaacgtctgatctttgttctttccctcggtatttatgatgaagttccaggaaaatttggcgaatggaataatgcagttattggtgagcccctaaaaccattccgcagggctgcggatgcaattgaggcttctggactggaatatacaattcttcgccctgcctggctgactgatgaagatattattgattatgagcttacctcacgcaatgaaccattcaaaggtacgatcgtatcacgtaagagtgtcgcagcattaatcacagatatcatcgataaacctgagaaacacattggtgagaatataggtatcaatcaacccgtgactgatggtgacaagccattattcatgtaaaccaattaaatagttaccatcgtaatgtactatgtgcagtacgatttattaaacttattaaggtgaactgatcaatccgatgcgattaacatgtgtagaaccagtaagaataaaatacgccatgtatataacattacgacttacatctaagtcagcataattctaatatctgcacatcaataaaaatgcaaacaacttccggcaaaaaaagtgatacaagatcgatgacatagcgttgaagaaaaggatttgataatccgcaaaatttgcacaacactgcctgggtaatgactccaacttattgatagtgttttatgttcagataatgcccgatgactttgtcatgcagctccaccgattttgagaacgacagcgacttccgtcccagccgtgccaggtgctgcctcagattcaggttatgccgctcaattcgctgcgtatatcgcttgctgattacgtgcagctttcccttcaggcgggattcatacagcggccagccatccgtcatccatatcaccacgtcaaagggtgacagcaggctcataagacgccccagcgtcgccatagtgcgttcaccgaatacgtgcgcaacaaccgtcttccggagactgtcatacgcgtaaaacagccagcgctggcgcgatttagccccgacatagccccactgttcgtccatttccgcgcagacgatgacgtcactgcccggctgtatgcgcgaggttaccgactgcggcctgagttttttaagtgacgtaaaatcgtgttgaggccaacgcccataatgcgtgcagttgcccggcatccaacgccattcatggccatatcaatgattttctggtgcgtaccgggttgagaagcggtgtaagtgaactgcagttgccatgttttacggcagtgagagcagagatagcgctgatgtccggcagtgcttttgccgttacgcaccaccccgtcagtagctgaacaggagggacagctgatagaaacagaagccactggagcacctcaaaaacaccatcatacactaaatcagtaagttggcagcatcacccactgcctgtaatacttcctgaaccagagacgatcatgaccgtaacccgcccacgcgccgaacgcggcgcatttccgcccggaacagaacattacggacgttcattattgggcgcgccgttaatctggtttcctgcccctgcagccagccgcgaaagtggtttgattctggctggcactcacggtgatgaaaactcttcggtcgtcacgctctcctgtgctctgcggacgttgacaccttctttgcgccgccatcatgtggtgctgtgtgtgaatcctgacggctgccagctggggttacgggccaatgctaatggtgtggatttaaacagaaactttccggcggcgaactggaaggaaggtgaaacggtttatcgctggaacagcgccgctgaagaacgtgatgtcgtattactgacaggtgacaaacctggctcagaacctgaaacccaggcgctgtgccagcttatacaccgcattcaacctgcctgggtggtctcattccacgatccactggcctgtattgaagatcccagacacagcgaattaggcgaatggctggcccaggcgtttgaattgcctctggtaaccagcgtcggttatgaaacgcctggctctttcggcagttggtgtgcagatctcaacttgcattgcatcaccgcagagtttccgcccatctcctccgacgaagccagcgaaaaatatctctttgcgatggcaaacttgctgcgctggcatcctaaagatgcaattcgcccgtcgtgaactgaagcgccggttccacatctaccgccagccaggtcggtccgtcaagatcggcgaaactgacctgcggcaccagcggtaaagcggcgctaatggcacgagaggtacacaacatgcagcccagcatcagactgaaaccttgtgcacgcgcttcagtcgccagcgccagcgcttccgtcagaccaccgattttatcgagcttaatgttaaccatctcatagcgccctttcagcgccttcagattgctacgtgtatgacaactctcatcagcacaaatcggcaacggatgaataaaattctccagcgccgcatcgtcctgcgcaggaaggggttgttcaagcatcgcaacgcctaaatccgccaatagctggcaacgcgccgccaacccttctgcacgccaggattcatttgcatcaacgatcagcgtcgcatcgggcacagctgtgcgaattgccaccatccgctcactaataagatggttatccagcttcactttcagtaatttcgcgcctgcctgccagagtgttgatgcactattggccatctgatcaggcgtaccgatgactaccgtctgtgcagtgataactgtctcgggaagcgttatgccgatcaaatcagccagcgattgctgctgttttcgcgcggccagatcccacaatgcacaatccagcgcattacgtgctgcgccggcagggagaattttttgcaactcctcccgtgtcagccctttctctaattgcgacacgacgctcataatttgcgccattaccgaggcatcactttctccataacgcggatacggcgtgcattcgccggtgcctttaataccctcttcttccagttcaaccaccaccacgcgcgcttcactgcgacttccccgggcaatcacaaacggggtatgtaagggccaggcttcctcaaataccttaacggttctcatctttactccttgttgtcgcggtggtctgcggattaagcgcaaatagcgtttgctgtgttattgacagttagcataaactaggtgtgacgttaactatatgtaaacaggaaagataatcatgtcacaaaccgttcatttccagggcaacccggttacagtcgccaattccatcccgcaggcgggtagcaaagcgcagacttttactctcgtggcaaaagatctgtctgacgtcaccctcggtcagtttgcgggtaaacgcaaagtgctgaacattttcccgagtattgataccgatgtttgcgccgcatcagtacgcaagtttaaccaactggcaactgagatcgacaacaccgttgtgctgtgtatctctgccgatctgccgttcgcccagtctcgtttctgcggcgcagaaggtctgaacaacgttatcaccctctccactttccgtaacgctgaatttctgcaagcttacggtgtggcaattgctgatggcccactgaaaggtctggcagcgcgtgccgttgtggttattgacgaaaatgacaatgtgattttcagccagctggtggatgaaatcaccaccgagccggattacgaagcagctctggctgtactgaaagcataagttaatatgcctgatggtgttgcaccatcaggcatattcgcgcttactcttcgttcttcttctgactcagaccatattcccgcaacttattggcaatcgcggtatgtgaaacgccgagacgttttgccagtttgcgcgtgctgggataattgcgataaagctgggttaataccgagcgttcaaaacggctggtgatttcgtccagcgaaccttccatcgcatcttcgcccacggctaccgttgcggcgtcataatccggcaacaaaatatcctgtggacgcagctcataaccgtccagttgtgtcagtgcgcgatagatagcgttctttaactgccgcacatttcccggccacgcataacgcgtaagtacagtattcaggtcagcggccagtttcggacgctgcacgccctgctcgtcggcaaagcgggcgacgaacagctcagttaacggcatgatgtcctgcggacagtcacgtagcggcggcagattgagcgtcaacacgttcagacgataatagagatcttcacggaacatgcctttttgcaccagttcgaccagattcttctgcgtaacgcaaatcacccgcacatcgacatgcacctcatggtcttcgccaacccgacggaaagtgccatcattaaggaaacgcagtaatttcgcctgcatccgtggtgacatttcccctatttcatccaacagcaccgaaccaccgttcgcctgctcaaagaatcctttcttcccttccggagcatgaccaaacagttcactctcgaccgcatcttccggtatagacgcacagttcagcgccaggtaaggtttgcccgctctggggcttgcctgatggcaggcgtaggcaaagagatctttacctgtacctgtgtcacccgtaatcagcagcggcgcgcttagcatcgccagtttctgcgcctgttcgacaacatgcttcattttcgggctgacggcgacaatttgactgaaggcgctgacgtcctgggcggcgacattttgcaactggcggcccatacgaatcgttgatcgcaacatcaccaccgcaccggtcaggacgtgttgatcattttcatcctgaagataaacaggcgtaatctccatcaggaaattctgcccattaataacgacatgctcgttatgcgaatcttgcggttcgctttccagccaacgtaaaaaattaaagccgttaatcaattgtgcggcggtatggttgcgcaggcgatccaatttttgcccaaaaagctgacagctcgccgggttcgccatatccactttgcttttcatatcgacagagagcacaggttcaggcaacgcctccagtaacgcgctcaacgccagatgctcacgttcggaaggcatccacgggacagtacgcacatcggtaacacccgcaatacggcgtatttcggccatcagactgctgaaactctcaaactccagttcagcaaaattgaggtagattcgcccaatgggatcaatctcaataccgcgtaaatcaatgcctcttagcacgagtagatcgagtaattcgcgggtcagaccgagtcggtcttcacaaaagacttccagacgcatgggaaccttcacctgaaaaaagaacaattaatatgatgatatgacactatttggatagcaggaaggtttctgtcaacaatcattgacacaaagacggaaaaacgggcacttcggcgtaaagatatccggtcagcacccgatattgggtaatgactccaacttattgatagtgttttatgttcagataatgcccgatgactttgtcatgcagctccaccgattttgagaacgacagcgacttccgtcccagccgtgccaggtgctgcctcagattcaggttatgccgctcaattcgctgcgtatatcgcttgctgattacgtgcagctttcccttcaggcgggattcatacagcggccagccatccgtcatccatatcaccacgtcaaagggtgacagcaggctcataagacgccccagcgtcgccatagtgcgttcaccgaatacgtgcgcaacaaccgtcttccggagactgtcatacgcgtaaaacagccagcgctggcgcgatttagccccgacatagccccactgttcgtccatttccgcgcagacgatgacgtcactgcccggctgtatgcgcgaggttaccgactgcggcctgagttttttaagtgacgtaaaatcgtgttgaggccaacgcccataatgcgtgcagttgcccggcatccaacgccattcatggccatatcaatgattttctggtgcgtaccgggttgagaagcggtgtaagtgaactgcagttgccatgttttacggcagtgagagcagagatagcgctgatgtccggcagtgcttttgccgttacgcaccaccccgtcagtagctgaacaggagggacagctgatagaaacagaagccactggagcacctcaaaaacaccatcatacactaaatcagtaagttggcagcatcacccgatattgcattatttttcgctgggtgttttgcctttttgcagtgtttctttcacctgaccgataagctgacgacggaaatccccgaggcgaggtttgtcatcgtcaatccacggcagcgggcggcaaagctccatagctttaatcccgagtcgtgccgtcagaagtcctgcaccaatcccctgagctgcgcgggtagacaaacgagcagcgagatcttgcgacatccagtccatccccacttcgcgcaccagttcgctggctccggcaaaagcgatattcagcaataccagcttaaacagacgcaaacggctgtaataccccagttcaatgccatacagcgtggcgatgcgattaattaaacgcagattgcgccaggcgataaacgccatatcgaccaacgccagcgggctgaccgcaatcatcaacgttgattccgccgccgaacggctgatttcgcgccgcgcctgggcatctaaaactggctggaccaaatgcgcatacaggctgaccacttcacggtcgttttgcgtttcatggattgaggcataccagcgttgcagcgccggatgcgactgatcaatacccgcctgctgcgccagtttttcgcaaaatgcgcggcctttgcccgtgccgtggctatgcaataaatcacgcgcttcgtcgcgttcatgggcgcgctgtcgcaagcaccataagcactgccactctgttaccacagaacctacgccagcgccgataatcaatgccccagcggcacatccacccagcgctacccagtcctgggtttgccaggcattcattgtccactgtacaccctgcccgacaacacttgcgccaaacagagccagcccgcccatcaccattttgcgccacaggctgcgtttcggacgtaacgctgcatccattaccgcttcaacttgcccctcttcttcaggcgcttcatcgagcgtggccggggcaaaattttgcgcctgattttcgtcaaaggtctgctgcgccctgaattttggattctgatcgacctccagcggaccgtcgaaatcaatacgtggttttaacggttcggtcatcgcaatttatctcctattaaaaattccagcacggcatcaagacgaatatgcggcagcggtttgtcgacatccatcacctgcgggcgaaacgcttcaaactggaacccttgcttgtcccagaacgcctgaccgggcaaacgcgcaggaacttcaccggggtaaacggtgagaggcgcaccatcgctgagccgattaccgcgcaatgccggaattttctcgccgttgacatcaataatgccgctggtggtcgcctgcaccgaggccagccccaggcaatccatactaatcccttcaaacgccgcattttgccaggcatcctgaatcagttgttgcagtaatgaaaccatattggcgtgctgatcgaccgttacatggtccgctttcgttgcggcaaacagcagtttgtcgataaccggcgagaataagcggcgaaagagcgtgcgctgcccgtagtggaaactttgcatcagctgcgtcagtgccagacgcatatcattaaatgcctgtggcccactgttgagaggttgcaggcaatccaccagcacaatctggcggtcaaagcgcagaaaatgattcttatagaaccccttcaccaccttctcgcagtaataattaaaccgctcgcgcagcattccggcattggtgtgcttatcggcctgcgccagtttggactcgccccaggtatcgacatccggccacgggaagaattgcagcgcgggcgcacctgccatatctcctggcaagacaaagcgccctggctgaataaagtgcagcccctgctgtttacagtggtggagataatcggtccacgcggcggcaatgtctgccagccggttttcgtcggcaggtgctagcgggtccagcccttcgcacatcattcgccatttgaccgaccattcgccgcgctgaccattgagtaagcccgtcatctggcgtgaccagcttaaatagtcctgcgccagcatcggcaggtcgagcaaccattcgccgggataatccacaatctccagatacagcgtggaggtgtctttgaagtggcgtagcagcgaatcgttcgatttaaaacgtagcgccaggcggatttcactgacgccgcgcgtaggcgtcggccaggcgggaggatcgccatataactgcgccagtccttcatcataggtgaagcgcggaatgccaaagtcacgctgaggaatgcgttttacgcccagcaggcgctcttcacgcaccgcgcttaacagcggcaagcgtgctccggcgtgaatattgagcaactgattgaccatcgcagtgataaacgctgttttgccgctgcggcttagtccggttacggcgaggcgcagatgtctgtcgacaccccgattcaccagcgcattaagttcatttttaagtcgcttcattgctgtcctgtgctgctctgaagaccagaaaaaaatcattcgtaaggatatgaatgtgggggccaggccattgattatcaactgcccgtgttgtcatcgacgggcgaactccataagatgtgcagcattcacgttcggacggagttcctgacctatgtcccctactatttatgatattgccagggttgcaggcgtatcaaaatccaccgtatcacgcgtgctgaataagcaaactaatatctccccggaagcgcgcgaaaaagtgttacgggccattgaagaattacagtatcagccaaacaagctagcccgcgcgctgacctcttcgggttttgatgccattatggtgatttctacccgttcgaccaaaactacggcgggtaatccgtttttctctgaagttttgcatgccatcaccgccaaagctgaagaagaaggtttcgacgtgatattgcagacgtcgcacaacccggcagaagacttacaaaaatgtgaaagcaaaattaagcagaaaatgattaaaggcattattatgctaagttcgccagcggatgagtcattttttgcccaactcgataaatacgatattccggtggtggtgattggcaaagttgaaggtcaatatgcccatgtttattctgtcgataccgataattttggcgacagcattgcgttgaccgatgcattaattgaaagtgggcatcaaaatattgcctgcctgcatgctccgcttgatgtccatgtttcagtggatcgggtaaatggttataagcagagcctggctgcgcataatattgcagtgcgtgatgaatggattgttgacggtggttatacccatgaaacagcactgcaagccgcgagagaattattaagccagtcaccgttgcctgaggcggtgtttgccactgacagtctgaaattaatgagtatttatcgtgcggcagcagagaaaaatattgctattccgcagcagttagcggtggtgggttatagtaatgaaacgctgtcgtttatattaacgcctgcaccgggcggcatcgatgttccgacgcaggagttaggtcaacaaagctgcgagttattattccgcttaatttctggaaaaccgtcaccacagaatattaccgttgccacgcatatgacgctgaaataaataccagctaccttgcctgaatgccggatgcgatgctagcgcatcttatccggcctacatttatagatcggataaagtactcgcgccgcatccggcaatttagcccattatcagaacgagtaatttacgccgacacctgcataatggaatttatcactgtctccttcgtcgtgatcctgccactcaaacgcgtattccagcgaaacggaaagtccgttctggaaatcataaccgtaaaataaacctacacggttaaaatcatggccttcacgttcaatatcatcctgccagtcccagttactccagcgatccagcccaatgcgcgtatacggcgtcaccgagtggttgccgagcgtcagcggcaaataggcgcgaatttcttgcgtggaaaactcaccgttattgcggctgtcgtccatattgaagccgcgctcgagataatagttcactcgcaaggcaaccgtttcgttgaaggtatattgcagacctgtttccgtttcgacacgggtatcagcgtaaccggtagtgttcagatcgttggcaaatttatacatcgacaaccaaccgttgaaacgtaaatcgtcagtcagtttcacatcccagtctggcgcgattttccagcgctgcatattcgccgtgtctttacccggttcatcaacgtagtgataaccataattacggaaaccgccggtcaggccgaaactgaaatcatcgttttcgaggaactgataatgcacctccagctccgggcgatcaaaccacgttccacgtttacccgcgctataatctaccggcccttcctgataataggccagagcaattctccacggcccgttggcggcattaaaatagactgaaggctccgccagccggtaatgactccaacttattgatagtgttttatgttcagataatgcccgatgactttgtcatgcagctccaccgattttgagaacgacagcgacttccgtcccagccgtgccaggtgctgcctcagattcaggttatgccgctcaattcgctgcgtatatcgcttgctgattacgtgcagctttcccttcaggcgggattcatacagcggccagccatccgtcatccatatcaccacgtcaaagggtgacagcaggctcataagacgccccagcgtcgccatagtgcgttcaccgaatacgtgcgcaacaaccgtcttccggagactgtcatacgcgtaaaacagccagcgctggcgcgatttagccccgacatagccccactgttcgtccatttccgcgcagacgatgacgtcactgcccggctgtatgcgcgaggttaccgactgcggcctgagttttttaagtgacgtaaaatcgtgttgaggccaacgcccataatgcgtgcagttgcccggcatccaacgccattcatggccatatcaatgattttctggtgcgtaccgggttgagaagcggtgtaagtgaactgcagttgccatgttttacggcagtgagagcagagatagcgctgatgtccggcagtgcttttgccgttacgcaccaccccgtcagtagctgaacaggagggacagctgatagaaacagaagccactggagcacctcaaaaacaccatcatacactaaatcagtaagttggcagcatcacccatcgccgatgatccaataaatccggcaacaaacatattcgctggttggttataaaccgttttcggcgcaccaacttgctgaacaatcccatccttcataatcacaatccgcgtcgccatggtcatcgcttcggtctgatcgtgggtcacgtagatcatggtggtattcagcttctggtgcagcttgctgatctctgcgcgcatttgcacgcgcagcttggcatcaaggttagagagcggttcatccattaaaaacacgcccgcttcgcgcacaatcgcccgcccgagcgccacacgctggcgttgcccgccggaaagcgcgcccggcttgcgtttcaggtactcacgcaggccgagaatttgcgccgcccagttcacccgctcatcaatcacctctttggcgattttttgcatcttcaggccaaacgccatgttgtcgtaaaccgtcatatgcggatacaacgcgtagttctggaacaccatcgctatattgcgtgctttggctggaacgtcattcattcgtttgccgtcgatcaacagatcgccgccgctgatctcctcaagcccggcaatcatgcgcagggtggtcgacttaccgcagcctgacggaccgacaaacacgatgaactctttatcggcaatttccaggttgaagtccttcaccacatgcacctggttatcgtagattttttgaatatgttgtaacgaaagctgagccatgttgattcctttgctatacgttttgccagaaggccgataaccgcgaccaggtcagggagtccgttgaaggcaatagtaattgcgccccggttatgcccgcgccgatccccaccgagcgcataccgctggcgttaatggcgtcaatgcccgcctgcgcatcttcaatgccgatacatgcctgcggcggcacgcccagcccggcacagacagcgagaaagatttccggatccggtttcgagtttttaagttgggaagcatccgcgcagaaggtgaaaaactcacgcagctccagtgcatctaaaatcgtcggcgcattgagggagacagaagccagccctaccgagatctgttgtgcgcggagatctgccagcaaagagcgaatgccgggtagaacagcgttgaccgtcaactcgcgcaatgagtggacatagagcagatttttgcgatacgccagttgcgccctctcctgcgagttaaagtcgccctctttgcccccgtgttgcagaatgcgccgcagagactcatcgcggctgatcccttttagggattcgttaaactgcgcatcaatgctgatgccaatttcagcggcaatctgctgccacgcctggaaatgcagatgcgcggtatcggtgattacaccatccagatcgaaaattaccccttgcagtttcattcatcctcctgatgtgtggcagcggtcccattgaagggcaaaataaaatcacccaaacagaaaacagattcttcagccacggatataagctgaccgttcaaacgcagtgaaacgggggcagaagttcgaatcgcaatacgctgcgcgtcaagagtgacctgtaattcgcagccctgccagaacagagggaaagacaactgttgccactgctcaggtaacgccggattgagatgcaattcaccgtcacgcacgctcaccccggcaaaaccctgaatcgcccccagccagatagcgccagttgcggcagcatggataccatcatcacaactatgcggatcagcaccaagatcgatttcagtcccctcgcgccagaactgataactttgggtcagcaggccacagcgtgcggcaacaatgccgtggattgctttacttaatgacgagtcgtgaatagtgcgcggttcataaaattgcagattggcaagacacgatgccgctgagaactgctccggcagcatgtaattgagcatcaccacatcagcttgtttgaggatttgcatctcgttcacttctgcgcgtgaataatccagcagaatggtttgcttccccgccgccgctttgtatttcgcaagattaatcgccggcttagccataaacgaatcatcctgcggcaaaacgccgtcgggctgaatttctggcagccgcagttctttaaggaacatttcggcacgatgaataaacgcgtcgtcgctacagccaaactggcgggcaatactcagcgcctgctggacgttgtaatacgccatatagctggtgaaggcgttattattgacatgttcggtatattcgtcaggcccaataacatcatgaatttccagacggtcgttaaccctcaccgcgcggctaatccagaactttgcagtttccagaagtagcgccatgccttcatgcgcaatgaaactttcatcccccgtggtctgccagtattgaataaccgcccaggcgatatcggccaccagatgatgttccgcctgcgccgaggccactttttgccgcagcccggtgcgaatgttaatggcggcaaattccggcgtctcttcttcgccgctgcgcgcgctttcccacggaaatagcgcgccctgccagccgttgcgtcgcgctttctcctgcgcgcctggcaagttgtgccagcgataacgcagtaaacttcgggcaaccgtcggatcgctaaacagatgaaacggtaacaaaaatacttctgtatcccagaaaacgtggcctttgtagccttcgccggttaagccttttgccgcaatgctgctgcgctcgtcgtgggcaggcgtcatgatgcgcagatgataaagcgcataatctaacgcttgctgatcgtgcgcttcgccgccatttaccgtgatacgacgtttctgccaccattgacgccagttttctgttgatactgcaagaagttggtcgtaactctgctgcgcgcacatttcaagctggcgaagcgacgcgctgccccactcgtctaaaacggcttgcctgtcatcccgccagtcgatccacaccagtttttgcaacgtcactgtctcgcctgcatgaagctgcgcactggtatgttgcagtaaacggcgctctttggcggtatagcattgctgcacatcaccgctcaccttacagcaacagctgatggccacatcactgcgtccatcctgggtggtgtagatcccctgcatcaaatgctgaccaaacacccgcacctgggtttcgtcgagatgctggcgaccgtggttggtctgcgtggcgtcaatgcctgttgaaatcagcactgacgcgtcggcgtccagtggcgtaatagtgatttccagcacaatgagcggcagttggtctgccgaaacaaagcgacggctggcgatggtgtaacctgtgccgttgctggtacgccagacaacgctacggcgtaattctccactggcaaagtcaagttcacgctgccaggcttcgcgggataacgagaaaacctcaccatttatggcaatctccatccccacgacatcaggcaggttcaccagttcgttgatttcaccttttcccgcccgatgatacagccccgccagatacatccctcgcgtctggcgcgtgtaatcttcttcatggctggcgcgaagcccaagatagccgttcccctgcgccatcagcgatgcatacttgttcagggtatgctggctgaaatggggttctgataacgttactggcctggtcataattccacacgcgtccctgtttctgcggattgatacaacgccgccaccagttgctggatgatgtacccctgcttggcgtcggctatcatcacgggcttgccctgtacgtgattgataaaggcttccatgctgcgcaaatggcggttgtcgtctgccattttccgttgcatcagcgtcattaattcaccgttgttatcggtgtagatatgtgctggaaacagcgtcgcaccagctttatcaccacaaaagctgacgttcataatcgactgttcgcggatgttgagtgcaaatgacgtttccagccacagaatgccgccgttatgaaattcaatggtgccaaacagcgaatcttcgacgctgtaagttgccggatcccactcaccaaattgaccacagctcttttgcgtgccgatcttttgaaagctatgcgcattcacgcttttcaccgccggaaagcccagcacatacatcgcagcatccagcatatgaatgccgatgtcgatcagcgggccaccaccctgcagttctttattggtaaagacaccccagccgggaacgccgcagcgacgcagggcgcgggcggtggtaacgtaaatctctcccaaaacgccgttggtcacctgttcacgcagctgttgcgtatcgagcgcaaaacgatggtgaaagtcgtaggccagcaccttgcccagtttgcgcgcggtatcgcacatttcccgcgcctgttctggcgtcatggcgagcggtttttcgcacatcacatggcagcccgcttccagtgccatcagggtatgttcgtaatgaaaacggttaggtgagcagacgctaaccacatcaggtttcaccgccagcagcatggcctgcggatcgtcccacacggatgcattcccgtatttttctgccagcgcctgcgcctgggaaaggcggctgtcacagacagccaccagttccagatcgttgcgggtgcagtagtacgaagcatgaaccttatccgccacctggcctgcgcctattatcgcgacccgcagcggagagcttgtcattgcacttttcacaaagacctcttagcaggtacgcaaccaggccaacgaatcacggtacgcctgggcaggatcttccgcccggatacgcccttcgtacactacatagccctgatagttatccgcgcgcagctgttcaaacagcgcgtggaaatccagggtgccgctgcccggctggtagcgatggttatccgcaatatgcacatgaccgagcaggtcgcggttgtcatgcagcgcctgcgccaggttatcttcttcgatattcatgtgatagaaatcgccgataatctgtacatgtttaagatcgttttcgacgatgtaacggcgggcatcggcgagggtgttgatcatatgatcctgatagcggtttaacggttcgagatacaccactgttccggtacgcgcggcgacctgttccagtacgcgcagggaatcactcaccattttgcggtcgccgtccaggctacgcggcgaggtcatcggcggtaagcggaaggtaaacatgccccacgctgccggaacgacgatacctttatcccccacttctgccagcgcttcgagaatgcgttcgatctgctttaagccattaagacgacgctcttcgataaagtcgccaatccaaccgtcatagccaccgcaggcggtggtcaccggtaaaccggtttctttgattgctgctttgacttcttcgagattgttgaccagcagtttgccgtcaatctcaaaaccatcgaagcccatctctttgatataacgaaatttctccagaatgttttccggaaagaatgcctgattctgtgtgcctattttcattttttcattcctttgaattaaaacgtaacgcccattttgatgctctgttccggatgctgatcgacatactgcatgtagctttccgggctattggcaaaggtcactaccgggtcgattaaatcttcgcaattgagataaccgttcatcagcagttcccagcaggtttcttcaatacgcttacggctccagcgcggataatccgggttcggttcgctgcacgcgcgggagaaaacaattttggcgttattgaaatgcgcttcgcgtccgaggttaaaaccttcagcaaatggtttggcaaacgcaacataggagatggtgccaccgtaggccagaccgcggaacgccgattgcagcgcgtcggcatagccgctggtttcgataatcacatcggcaccctgcttgccggtcagcgttttgatctctttgcctacgtcagtaccaatggggttaaggcagaaatccgcgccgtggcgacgggcaatatcacagcgatgagcgataggatcgacgccaatcacgaccgacgcgccagcacgtttagccagttgaatggcaatttgaccaatcgcgccaagccctaccaccacaacaaaatcacccacgcgcacgttggcatcgcgcacgccgctcatggcaaactgcgccgggtcgtaacaaacggcgtttttccacgagctgccttccggcattttgcgcagcttgtagttattcaccgcgttaatgatgaccgtctcggagagcgggccgtagccgcatacgctgtcgcccaccgcgtagtcggtaacgtcgctgccgcactcgataatgtcgccaaccaccatgtttccaagctggaatttgccaaactcaatgccgcgcggcgcatctgccggacgcggagtgaacatctgccattcgccgttaaagtcttcatcgataaacgggctggcggcgcggaagtcgaccacttccgttccgtgtttcggtgcgccgaaacgcacgcggaccttcacttcattagctaaaatcgcccgatcttcatactcaaccagcgcagcaacacgcggtgctgtggctactaactttttcatttaaaactccttgtaaagaaactggccgctttagcccttcacgccaccggcggtcaaaccactcttaataaaacgttccgaaagcgcatacataatcaccaccggcaatgcggtcaccagtgaggccgccatcatccgtccccagatgtaatctggcgtactgaacagcgcgttcaggcccaccggtaaggtgaaattgccggcgctggagaggaaaatcgacgcaaacagatagtcgttccacgccaccataaagcagtagacgaacacggatatcaacccggacatcgccaacggcacggtgatgcggaagataatttgcagacggttgaggccatccatcatcgccgcttcttcgatctcatcggggatggtgtcgaagtagcttttcagcataaacacggcggtgggcagagtttgcgtcaccatggtgatgatcagcgccatctcagtgtcgtaaatgcccagcgcggtgatgattttgaacagcggcaccaccagcaaaatgccagagaacatatacaccgtgtaaaagctggcgttgatggtcatccgacctttaaagcgcaggcgggaaagcgcgtaagccccaagaatgccgaggaataccgccaccacggatgaaaccacagacaccaccagactgttacggaagtagtcgacaaacgggaaaatcatcgggttaaaaatgtcgacgtaatgctccagcgtccactgctgcggcagcagcgtaggatgcagtgagatcgcctctttcgcgcccttgaacgaggtcatcagcatcacaaaaaatggaaacagcgtgatgatgagaaacagcgccagcccgcagtaaaaaccgatgcgactgagtgtgcgtttatttgttgccattgaggttcacccgtttcctggtcagcagaatgacagcgaaaataatgatgaagagcaccaccgaaatcgccgccgctttccctaagtcattaaaggcaaaggcggttttgtagagatagacgccgagaatatcgaccttggtggtcagcagataaacatcagcaaacatgtagaacatccagatagtgcgcagggtcaccaccgtcgccaggaccggcataattgcgggcagcgtgacgatgcgaaaccgctgccaggcattagcgccatccatctctgccgcttcgtacagcgatttgtcgatggtctgcaaaatcgccagaaacgagataaaggcatacgggaagtagcgccagatggcgaacagcaccaccagcacaaagctactgcccggattatcgaaccacagcggtgcctgctcatagagatgcagaagatcgacgccgaggtagttcacaatgccgtagccgttgttgaacatgtatttccaggcaaacaccagcgaaatggacggcgttacgtaggagaggatcaccagcgaacgcgcggttttgcgcaggcggaactcgcggttgaaaaacatcgccactgccagcccgagcacggtgctgcccgccaccaccagcgcggtataccagaccgtcatccacagcgagtgccagaagccgggatcggagaggatacgcacatagttactcaccccaacaaaggttgactcgatgttgggattgagcggcagacgtaaaaaactgatttcgatattcgacaccattggccaggccaccagaccacccagcagtaataagctgggcgcgagaagcagcagcgcaaagggcatatcggaacgacctgaaaaaagcctgttcattgcggattcctgtcctgggtttagtgctgttcgatcagttcatccagctttttctggctcgcttgcagcgtgccagggagatcggctttacccacggtgacgttatgcaccatggagctcaccacgccagaacccgtcacatcacccatgcgggtaaagtttttatcccctactgcgccaaagacctgaatatttggcagttcaccgattagctgattcggtagttcacccagcgccttaataacgtcgttgtctttccaggtggcggtagtgacaaccgctttattcaccggcagcgcagcacctggcgacatcatcacccagtcggcaatgttgtctgcctgctccataaaggtgacaaatttttctgctgcttccgtctcttcggccttttgcccggcggtaatggtcagcgaggtcaacatgccgtagaccgcagagtttttctcggttggcaccacgaaaccgacgtttttcgggtcgccttctttaattacagccggaaggatataggtggagtaaatcgccatcggcgcggtgccgttcataaaggcgtctttcacttccatgatgtcgttagaacccggcatgtcgttagaacccggcatagtgttggcagcaaggtcgcggtaataggtcagtgcctgcatcatctctggtgtatcaagggtgattttgccttcggcgttaaagacgttagcctggttggataacgcaaactgggagaaggattgttccgtcaacacgctttctgctgtaggcagcgcaatgccgtattttttattcgccgggtcattcagtttctgtgcaacgtccagtagctgttgccagtttttcggctcctccagccccgcttttgccagcacatctttgcgataccagatgccgccaatccaggcgctgacgggaacaccggtccaggcactcccatcttcggtgcgcacaatacgcagtacgccatcgtaaaacgcgccttcaccaacgttgctgatgaccgtggcaaccgtcttgcgatcgataagctgctctttatccataactttggcgtagtcatggctggtttcgatcacttccggcagcgagccgctacgtgaaagggtgatgactttggtgttataagcgtcctcttccacgggcacttgtttaacggtgatacctgggttttctttttcaaaacgggcaatcaatttgctgataactgcctgacgctcctgctccaccgaagaatgcataaattcgatggatacatgggttttattttcttctttacagcctgaaatcagggcgcaggaaaccagtgctgataacagcacgatttttgatttaatcatgagatgttcctttttatttaatccacataacctgccaggggcgcagcgttatttcattacccaatagatcaacttcactaatcagatcccgaccatgcagattagtaatatttacatgctgaatatttttactgacattaaacaatccagtcagacaattaccatcagcgttacttctttgaatacgcattacggatgaattaatcgtatcgatggtaaaattattatccggatgaaactcgttatggctgcgacgaagtgtaattaaacgcgacaactcatgatataccgcatgccttaatgtagcttcatcgttcagttctcgggttatctctttactgtgatattttttacggttaatcgcacggttatatccgagtttttcgacacctgcgtaatcattacgcgagccaagaatactttgaatatatatcgctggcacaccggggaaacttaacaaaatcgcatgggcgagaataaacctggcgcaacgttcttcatcgctactctcacggcggcttaacgcatccatatgtgagaggcgaggaagttaaaccaggtggtgttgctggaaggtagtgtcaggttttgcgcccacgcacaaagcgcctcaacgttctgtttttgcaccgcatgcagcaccagtggcggcagcgagaactggtacaccatatgtgcttcgtcatcgcctgcgccaaagtaagcaatgttgtctttatgcggaacattggtctcggtaatgatcactgtacctggcgcaacgttatcaataatcgaccgtaacagtttgataatcagatgtgttttttccagatggatgcagcttgttcccggctctttccacataaagccaacggcatccaagcggacatactcagcacctttcgcaaggtaacagagtaaaacatccaccatcgccagcaacacttcagggctacggtaattcaggtcaatttgatcgtcactaaaggtggtccataaatggcgcgttgaatgatcgcgcatctggaatggcgttaataacggtaacgcacgcgggcgagtgacggcgctgagatcggtttgcggatcaaccgcaataaaaaaatcttcaaaacctggctgctgttgtaaatagtttttaaaccattcactttttgccgacatatggttgcagacaaaatcaaacattaaatgactgcattcaccgagttgctgaatatcctgccactcccccgcttcactggcgacctgatgataatcaattaccgaaaacccatcatcagatgaacatggataaaaaggtaataaatgaacatgtgaaaaaatgctttgcagccattgatggtaaaactgattaaatgtgggtaatggttttaaatcattgctgtgaaattgatcggcataggtaattaacacgacatcactttcatcccagtgttttttacgtcgctgtgtaattaatcgtttcgcactctcaagacgcgttacaagtttctgtaaatgagttgcggtaaatgttccaccgtagatttcgtccaggtaatccgtaattttctgtttcatgttgcctttttgtggtagcggtcccatgaaacgagagactactccgcagaaaataaactgtcaattgagcacaagggttttagtcacgcaggaaatcattttttaccagggaaaaagcgtatttgtgagctgacgcaaataatctatggggatgtgaataaggtgtgacagaaaaaaaacggcgcataagcgccgctcatggtgaattcttttaacctttgaccttcggcattgcgatgtctttcaggccaccggcgttctcaacgtgggtatatcccatctcgctaaggatctcttttgcttgccctgactggcgtccggcattgcaatacactttcacggtgtcgtttttatccggaacggcggtggcaatgcgctctttcacttccttcaggggaatattgatggccccctgaacgtgctcttgctgatactgctctggaacacgaacatcgatccagtgttcagcggcgaaaacgggcagtgaaaacaccagtgccagagcaagtaagccttttttaaacatgtaagcgtccttctatggatgaaaattgccatccattatacgcctgagatttaacaatttttgcgaaactcccctcaccttttataacgctgtgccagtttattagcagcccgacttaacagcggttccagcgccacagccagcaacattttcagcggtcggcgagcaactgattttatcgcccagcccgctacacccgccgggccatagcgcagtgcggtaagaagtaccagcttgcctgctaatttgaaaccaggctttaccttttgcccggcctgttgccagcgagtattcataactttcctcacagttgacggaaacggctacgtaacgtgaaagtatcggaagtgacataacgttccatctcgcgtaaacgcgtttcacttgccgccagttcacggtcgacttcatccagcaattcgctgctggaaggtagctgctcaccaaaggccatgttgtccggcattggatcaagcgcaaatgacaaaatgatgtaagcaaccagggtaaacagcgccagaccgaagaaaatcgacagcaccaccaggatacgcaccagttttaccggtacatcaaaatagttggcaatcccggcgcagacgccgcggaccatgccctgctgtggaatacgccataattttttattgagattaatgcccgccattagcgatccctccagttcggatgttctgcatcaagaatagattccagcgcctgaatacgttcgcgcatccgttttgcttcatcagccagttgcgctaatcgctgctgctcactttgcgacaattcatcgcgaccagaacgattgctgtaatgcagccataaccagatcggtaaaacaaacagcacaaaaatggttaacggaatagccagaaatagcgcgctcataagtactccttagacgatgagcggcggcgcgttcggacgccgcctggatgttattattgattgtcttgcttcattttggcttttaattgtgccagttgttcgctgattgcatcatcggctttcagttcggcaaactgatcgtccagcgatttttgtttaccgaagctgtggctttctgcttccgcttccatctggtcaattcgacgttcgaaagattcgaaacgagccattgcttcatccagtttgccactgtccagctgacgacgcacatcgcgcgacgagtttgccgcctgatgacgtaacatcaatgcctgctggcgagcgcgtgtttcgctcaatttgttttccagctcgccaatctctttcttcatgcgtgccagcgtatcgtccaccagcgtcacttcatgttccagggacttaatcagatcggtcagtttctgtttttcaattaacgctgcacgtgccagatcctctctctctttcagcagcgccagttcggctttttcctgccattcaacttcacgcgccgacgcttgttcaatacggcgagtcagctgtttcttttctgccaacgcacgcgccgaagtagaacgtacttcaaccagtgtatcttccatctcctggatcatcagacgcaccagtttctgtggatcttccgctttctctaacagagcgttgatgttggcattcacgatgtcggcaaagcgagaaaaaatacccataatgttgtcctcttgatttctgcgttcaggattgtcctgctgaactgttaatacaatttgcgtgccaattttttatctttttgatttataaagatctgattgaagaatcaacagcaacatgccaggatgaattagcgaattacactaacaagtggcgaatttcatcatggccgaatacaaagataatttacttggtgaggcgaacagctttctcgaagtgctggaacaggtttcgcatctcgcaccgctggacaaaccggtgctcatcatcggcgaacgcggcaccggtaaagagctgattgccagccgcctgcattatctctcctcccgttggcaagggccgtttatttcccttaactgcgcggcgttaaatgaaaatctgctggattccgaactgtttggtcacgaagcgggggcgtttaccggtgcgcaaaaacgtcatccagggagatttgaacgtgccgacggcggtacgctatttcttgatgaactcgctacggcaccgatgatggtgcaggagaaattattgcgcgtgattgagtacggtgaactggagcgcgttggcggcagccagccattgcaggtgaatgtgcggttggtatgcgcgacgaatgccgatctcccggcgatggtcaatgaaggcacttttcgcgctgacctgctcgaccgactggcttttgatgttgtacaactgccaccactgcgcgagcgcgaaagcgacataatgttgatggcagaacactttgccatccagatgtgtcgggaaatcaagctgcctctgttcccggggtttacggagcgcgccagagaaacattgctgaattatcgttggccgggaaatattcgtgaattgaaaaacgcggtggaacgttcagtgtatcgccacggcaccagcgattatccgcttgatgacatcattattgatccctttaaacggcgtccgcctgaagacgctatcgccgtttcagaaaccacctcgcttccgacgctgccgctggatttacgtgagtttcaaatgcagcaggaaaaagagttgctgcaactcagtttgcaaaaggggaaatataaccagaagcgcgcagctgaattgctggggttaacctaccatcagttccgcgcgttgttgaaaaaacaccagatttagcgaagttgggcaatgcgattcgccggatgcggcgtgaacgctttatccggcatacataatcaacgtcgtttgcaggcctgataagcgcagcgcatcagacattattgcgttgggctattaatcgctcagcgcatcctgcaaaattttcattgccgcatcgaattgcgcatccgggatggtcagcggatacaggaagcgaatcacgttgccgtatgcgccacaggtcagcaggagcagcccctgcgccagcgcgcgttgctggattttctgtgcaatcgccgctgacggctcgcccgtttgcggatcgttaaactctgccgcaatcatcgaccccaggccgcgtaccgcagcaatggccggaacgctttctttggcatcaatcaacgtgtttttgagacgctggcccagttgattcgcgcgttcgcagagtgattctttgttgataatattgagcaccgcgtgcgcggcagccaccgccagcgggttcccggcgtaggtgccacccaacccgcccggcgcgggcgcgtccataatattcgcgttaccgaccacgcccgaaagcggcatcccgcccgcgaggcttttcgccatcgtcattaagtccggcttatcggcgtaatgatccatggcaaacagtttaccggtacgcgcaaagccgctttgcacttcatcggcaatcatcacaataccgtgctcgtcgcacaggcggcgaatggcggcaaccagctcttttggcgcaacgttgaaaccgccctcgccctgcaccggttcgaaaataatggccgcgacctgcttcgcttcgatgtctgatttaaacaagcgttcgatggcgtcgagggagtcctatgttgaaatgccgtgtaaatctgacggataaggtacgtgatacaccgaaccagggaacgggccgaagccgattttgtacggcgcaacttttccggtcagcgccatggtcatatatgtacgaccgtggaagccaccgctaaacgcaatcacgccagggcgtccggtatgggcgcgagcaattttcaccgcgttttccaccgcttccgcaccggtagtgaagaacgcggttttggcctgcccgctcaccggggcaagggcgttgattttctccgccagggtgacgtagctttcatacggcacaatctgatacgcggtgtgggtaaactgttgcagttgctgctccaccgccgcgaccagatcagggtggcgatgtccggtattcagcaccgcaatgcctgcggcgaaatcgatgtactcgttgccctcaacatccttcagagtagcgttttcagccgactgggcgaagaagttacacatcacgccaaccccgcgtggggtagcagaaagacgacgctgatggaattcattgttgctcatgtttcacaccttttgactcttcactgttaatcggaaattaaacgcccagacgatcgcgcaggctgtaccaggctgcgcccatcgcggtaaacggtactcgcagcgtgcgcccgccggggaacgggtaatacggcagattggcgaaggcatcgaaacgttcggcgtcgccgcgcagcagttcggcaatcaaacgtccggcgagatgagtacaggtgacgccgtggccgctgtaaccctgcatgtaatagatgttggtatcaaggcgaccaaactgcggcatgcgcgacagggtcagcaggaagttgcccgtccagcggtagtcgattttgacgcccttcagttgcgggaaggttttcagcagtttcggcacaacaagacgctcaacgtcatccgggtcgcgcgcgccgtagaccacgccgccgccgtacagcaaacggttgtcggcggtaagacggtagtaatcaagcagataattacagtcttccacacagtagtttttcgggatcagcgaacgggctaaatcttccgacagccgttcagtggtgatcacctgcgtgccgcacggcatgctgcgtttcgccagttccggctctactttatcgcccagatacgcattcccggcgacaatcacatacttcgccgtcacctgacctttggcagtgcgcaccaccgctggcgtggtgtgctggatctgcgtcacggcagaaagctcatacacgcgcccgccgttcaggcggatggcatcggcttcaccaatggcgaggtttagcgggtgaatatgcccaccgctgtgatccaacagtgcgccagtgtagcgatcgctggcgacctcgcggcgaatggcgttagcgtccagcagctccagctgtttattgccgtagcgttcccagttctctttctgctcttcgagtgtggcgagctgtttatcattcatcgccacaaacaggccgccggggcggtagtcgcagtcaatctgatagcgtttgatacgttcgcggatgatctcgccaccctcgaacatcatgctgccgagcatacgggcggtgtccatgccgtagcttttttcgatcacgtcgatgtcgcggctgtaggagttcacaagctgcccgccattgcgcccgcttgcgccaaagccgatgcgtgaggcttcgagaaccactacgtcaaagcccgcttccgccagatgcagcgcggaggagagcccggtatagccgccgccaaccacgcaaacgtcgcaggtgattgactcattcagtgtgtcgaatggtgcatatttattcgcactggcggcgtagtaactgctggtatgttcggtcatttcaggcctccaggcttatccagatggttttcagttcagtgaatttttcaagggcatgcagggatttgtcgcgaccgttgccgctctgcttatagccgccaaacggcacggtcatatcgccgtcgttgtagttattgacgaagacggaaccggctttcaggcggcggctcatacggtgcgcgcgggagaggtcgcgcgtccataccgccgcgccaaggccgtactggctgtcgttggcaagctgtagcgcctggtcttctgatgtgaaacgcgtgaccaccagcaccggaccgaaaatctcttcgcggcttaaggacgcattcgggtcaacatccacaaagatggtcgggccgatggcggcagccagctcagcgttacgaccatccagcagcagttgccctttgctttcgccttcacgaataaagctatggaccgagtcggcgtgggcgcaatcgattaaggtgcccatggtggttacggtatcaagtggatggcccggctgccagttttgcgcctgctgttttaacagggctaagaattcatcggcgatgctctcttccagtaacaaacgcgttccggcgatgcacacctggccctggttgtagaagatgcctgcggcggtggcgcttgccgctttttgcagatccggacaatcggcgaaaacgatgttggcgcttttgccgcccgcttccagccagacgcgtttcatgttgctatcacccgcgtctttcagcagttgtttacccgtacgcgtggagccggtaaaggcgatggcatcgatatcgttatgacgcgaaagcgcctgcccggcttcatgaccataaccgctcactacgttcagcacgccatccggcagccccgcttcttcttttgccagcccggcgagacgaatcgcactgagtggtgatttttcagacggttttagaatcacgctgtttcccgccgccagcgccgggccgagtttccagcaagtcagcagcagcgggaagttccacggcacgatggcggcaatcacgccgaccggttcacgcacgatcatcgccagctcatggctactggtggtcgccacttcgccatacactttgtcgatcgcttcggcgtaccagcgaatggcgcgcgccgcgccgggaatatcatcacgcagactgtgacgaatcggtttgccggtgtcgagagtttccagcagtgccagctcttcggcgtgggcttccattaaatcggcgagtttattcagtaccgctttacgtttagccggagaagagagtgaccagtcgccgcgttcaaatacgccgcgtgctgcgctcaccgcatggtcgatatcgacgctcttgccgcgggcaattttcgccagcggtgcctgggtgaccggatcaacggtttcaaaggtttcattttccgccgcagcagtatattcaccgttaataaataagcggttttcaatggcgagacttaacgctttatcctgccagtaagccagatgatgaaaattcattatgactcctgtttcacgtctatcagatatatgcagtttgtgaacgtcagggcgcagagatccccgggccgcatgcccgtttatttctggcgacattctttatggattgccgggcgcattgcgcttacccggcttacagaacaaaaagattaaaacgtggtgggcgtatgggcgctgataattcggcaaatacctgccgacgtattactgaaactgtgcgggatgccggtattaatggcataactttgccccgcgacgaggtggtaatcctgaccattaatcgtcagaacaatttcaccttccagtactgtgcctatttcctcaccctgatgcttaattctttccccagtggttgtgcccggctggtacgtttcaaagatcatcgccagcgtgcgattcgggttaccgttatgaaccagcttcattgacacaccctgactgcccatctcaattaagtcgtcctgattaatgacgacctgcggctcatcaggtttttccggctcggaaaagaattccgagagtgacagaccatacaccttcagcagcttttgcagcgtactgatggcagggctgactttatcttgttctatcgtactgatagcactgtgagtcagcccggagagttcggcggcacgacgttgtgaaagcccctgctgctggcggatttccgacaagcgttttcctggcgccagtccctcatcactcatatttgcatttccttaaactgtagtggtcagagtcgctgtttttcagcgatatggtgctgacaagcggtgataaagccctcgaacaatatacgcgaaagcgcgtactcgctactgttccattccgggtgccactgtacgcccagcgcaaaaggatgattgatgacgctaaccgcctcaactaagccatccggcgagcgagcttcaacacgcaaccgtgggctaacgaccttcgccccttgtccatgtagagagtttacccaaaagttgctacattcaggtaacaacgcagacagtaatcccccctcttcaacctgaacttcatgcgacggtgcatattgctgttccaccggcagttcgggatcttcccgatgttccagcaattcaggctgttcgcacagcttgcgatgcaacgaaccaccggttgccaccaccagttcttgtaaaccccggcagatggcgaaaatggggatgcgcctttcgagtgcggcattaattatcgccatgctcagaagatcacgcccgggatcggcgtcaggctcatcgccgttttcaccatataggtgcggctgcacattgctgggactaccaggaagataaatgccatcgagtttcggcaaaagttgttcaagtaacgacggttccgccagcgcatgtggtagcgcaattggcaagccgcctgcgtggatgatggcattcaggtacttttcttgcagagtctgggtcgcatgacccttaagcctgttcctgcacattacgacaccgataaccggattgttcattatattttccatgctcaatctcacaaagtggactaaattatcgccattactgcgctttaaatgacctttatgttcaatattttttcaatctagcagtgggttttcatttttgcaaactcaatttaacatttgacaaacatttagtttgcatacagattcgaatggtggtcattatattttacgctttgataacgagcggaaaacaaaccaaaggcgaagaatcatggaaaccaatatcgttgaagtagagaactttgttcagcagtcagaagagaggcggggtagcgcctttacgcaggaagtgaaacgctacctggagcgctacccgaatacgcaatatgttgatgttttacttactgatttgaatggttgcttccgtggaaaacgtatccctgtttcaagcctgaagaagctcgagaaagggtgttatttcccggcctcggtatttgcaatggatattctgggcaacgtagtagaagaagcaggtctgggtcaggaaatgggcgagccggatcgtacctgtgttcctgttctcggttccttaactccttctgccgccgatccagagtttatcggtcagatgctcctgaccatggtcgatgaagatggcgctccctttgacgttgagccgcggaacgttcttaaccgcctgtggcagcagctgcgccagcgcgacgctgaagggaatctgcaaccgccctgcgcgcctggcaccgatgaccgcaatacacaaagccaggtttactccgttgataacctcaaccacttcgccgacgtgctcaatgatattgatgaactggcgcagttgcagctgattccggcagatggcgcggtcgctgaggcctcgccgggtcagtttgaaatcaacctttaccatactgataacgtgctggaagcctgcgatgatgcgctggcactaaaacgcctggtgcgtctgatggcaggaaagcataagatgcacgccacttttatggcgaagccgtatgaagagcacgcgggcagcgggatgcatatccatatcagtatgcaaaataatcgtggcgagaatgtgctttctgacacagaaggcgaagattcgccgctgctgaaaaagatgctcgccgggatgattgacctgatgccgtcgtcgatggcgttgctggcaccaaacgtgaactcgtatcgccgcttccagccgggaatgtatgtgccgacgcaggcgtcgtggggccataacaaccgcaccgtcgccctgcgtattccgtgcggcgaccgtcataatcaccgcgtggaatatcgcgtggcgggtgccgatgccaacccatatctggtgatggcagcgatttttgccggtattttgcatggccttgataacgagctgccgttgcaggaagaagtcgaaggcaacgggctggaacaggaaggcttacccttcccgattcgccagagcgatgccctgggtgagtttatcgagaatgatcacctgcgccgctatttaggcaaacggttttgccatgtgtatcacgcctgtaaaaatgatgagctgttgcagtttgagcgcctcatcacagaaacagaaattgagtggatgttgaaaaacgcgtaattccccttgcggggttgtttcatcggcctgagcggagccaggcctgacatttgctggtaatccagacatttcccggatgtcgcgttatggagcgcaggcggcaacgggcttccgttaacgattaagactgtgacgaggaaatgagatgatgccgatgattaaatccccgcatggcgagggaggctgcgtatgcgcccctcctgctactgactggactccgccccctttgcttcccttgctaaacaggtttgatttcaggtcgacacgaccgcaaaccttattacgcaggggaggcagcaattatggctattaattcaccactgaatattgctgcgcaacccggcaaaacccgtctgcgaaaatcactgaaattgtggcaggtggtaatgatgggtctggcctatctcacgccgatgaccgtatttgatacttttggtattgtctccggcattagcgacggtcacgttccggcgtcctatttgctggcgctggcgggcgtgctgtttaccgctatcagctacggcaaactggttcgccagtttccggaggccggttcggcctatacctacgcgcaaaagtcgattaacccgcacgtcggatttatggtcggctggtcatcactgctggattatctctttttgccaatgatcaacgttttgttggcgaaaatctatctctccgccctcttcccggaagtgccgccgtgggtgtgggtggtaaccttcgtcgccattttaaccgccgcgaatctgaagagcgtcaacctggtcgctaacttcaataccctgtttgtactggtgcaaatctccatcatggtggtgtttatcttcctggtggttcagggactgcataaaggagaaggcgttggcaccgtctggtcacttcagccgtttatcagcgagaacgcgcacctgatcccgattattaccggtgcgacgattgtctgtttctcgttcctcggtttcgatgcggtgaccacgctttcggaagagacgccggacgccgcacgcgtgatcccgaaagccatcttcctgacggcggtatacggcggcgttatctttatcgcggcgtcgttctttatgcagctgttctttcccgatatcagccgctttaaagacccggacgccgcactgcctgaaattgcgctgtacgtcggcggcaagctctttcagtcgattttcctctgcaccacgtttgtgaacacattagcgtctggcctggcttcacatgccagcgtgtcgcgtctgctgtatgtgatggggcgtgacaatgtgtttccggagcgcgtgtttggctatgtgcacccaaaatggcggactccggcactcaacgtcattatggtcgggattgtcgcgctgtcggcgctgttctttgatttagtcaccgcgacagcactgattaacttcggtgctctggtggcgtttaccttcgtgaatctgtcggtgtttaatcatttctggcggcgtaaaggaatgaataaaagctggaaggatcacttccactatttgctgatgccgctggttggcgcgctgacggtgggtgtgctgtgggttaacctagagtcaacgtcactgacactcggtctggtatgggcttcgttaggcggcgcatatttgtggtatctgatccgccgctatcgcaaagtgccgctgtacgaaggtgacagaacgccggtgagcgaaacgtaatagccggatgcgcggcgcattatcctgcctgagggtaacgcgccgcgccattaactataaaaagatgtatgacccggatcacgagtgctatcatccgcccttatgcttagcgcattaaccccaggggcaaataatgaaccacgatatcccgctaaaatattttgatattgccgatgagtacgcgaccgaatgcgcagagcctgtcgcagaggctgaacgcacaccgctggcccactacttccagttactgctcacccgtttgatgaacaatgaagagatcagcgaagaagcccaacatgaaatggctgctgaagcggggattaatcccgtacgcattgatgagatcgcagagtttttgaatcaatggggtaatgagtaattatttaattgcagacgatcggtcagtatcgttgtccggataaagcgttcacgccgcatccggctaacaatgacacgcactgcagcgtgctttaatgggtttctcacgatcgtaccgctctgctcctcgctaagttgttctgtgagttatagttatagagaaatcacgggtacgaatgttgaacagatggcgacgccacctgttcaacgaccaaccacacggccctcattacgacccctgaacacaaacggtaatggcaaatgtcattaaatattagtaagatagcctctttacataaaatcccttaatattatgcgccaggtattatcgtctcttttggtgattgctggacttgtgagtggtcaggcaatcgccgcgcctgaatcccccccgcatgctgatatccgcgacagcggttttgtctattgcgtcagcgggcaagtcaacacctttaacccatccaaagcgagcagtgggttaattgtcgatacccttgccgcccagttttatgatcgactgctggatgtcgatccctatacctatcgcctgatgccggaacttgccgaaagctgggaagtactcgacaacggcgcgacctatcgcttccacctgcgtcgcgatgttccgtttcaaaaaaccgactggtttactcccactcgtaaaatgaatgccgacgatgtggtgtttaccttccagcgaatttttgaccgcaacaacccgtggcataacgtcaacggcagcaacttcccctacttcgacagcctgcaatttgccgataacgtgaaaagcgtccgcaaactggataatcataccgttgagttccgactcgcccagccggatgcttcttttttgtggcacctcgcaacccattatgcttcggtcatgtcggcagaatatgcccggaagttagagaaagaagatcgccaggagcaactcgaccgtcaaccggtcggcaccggtccgtatcagttgtcggaataccgcgccgggcaatttattcgcctacaacgtcatgatgacttctggcgcggtaaaccgttaatgccgcaggtagtggtggatttaggctccggcggcaccggacgtctgtcgaaactcctgaccggggaatgcgacgttctggcctggcctgctgccagccagctatccattttgcgtgacgacccgcgcttgcgtttaacgctgcgtcctgggatgaacgtcgcctatctggcatttaacaccgccaaaccgccgctaaataatcccgctgtccgccatgcactggcactggcgattaataaccagcgcctgatgcaatccatctattatggtacggctgaaacggcggcctctattttaccgcgcgcctcgtgggcctatgacaacgaggctaaaattactgaatacaatccggcgaaatcgcgcgaacagttgaaggcgttggggctggaaaacttaacgctgaaactgtgggtgcccacacgttcgcaggcgtggaaccccagtccactgaaaactgccgaactgattcaggcggatatggcgcaggttggcgtaaaagtggtgattgtgccggtagaaggtcgctttcaggaggcgcggttgatggatatgagccatgatctgacgttatccggttgggcgacggacagtaacgacccggacagtttcttccgtcctttactgagctgcgcggcaattcattcacagaccaacctcgcccactggtgcgatccgaaattcgacagcgtgttgcgtaaggcgctctcctcgcagcagctggcggcgcgtattgaagcctatgacgaagcgcagagtattctggcgcaggaattacctattctgccgctggcgtcgtcattgcgtttgcaggcctatcggtacgatatcaaaggtctggtacttagcccgtttggtaacgcctcctttgctggggtgtatcgcgagaaacaggatgaggtgaaaaaaccatgattatcttcaccttacgccgcattttgttattgattgtcaccttgttcctgctgaccttcgttggcttcagcttgagctatttcacccctcatgcgccgttacaaggcgcgtcactgtggaatgcctgggtgttctggtttaacggcctgatccactgggattttggtgtttccagcattaacggtcaaccgattgccgaacagttaaaagaggtcttcccggcgacgatggaactgtgcatcctcgccttcggttttgcgctgattgttggcatccccgtggggatgattgccgggattacgcgccataagtggcaggataacttgatcaacgccatcgccttactgggcttttcaatcccggtgttctggctggcgcttctgttgacgctgttttgttcactcacgctaggttggttgcccgtttcagggcgtttcgatctgctctacgaagtgaaaccgattaccggttttgcgttgattgatgcctggctttcggactcaccatggcgggatgaaatgatcatgagcgcaatccgccatatgatattgcccgtgatcaccctgtcggttgcgccaacaactgaagtgatccgcctgatgcgtatcagcactatcgaagtgtatgaccagaactatgtaaaagcggcggcgacccgcggtttgtcgcgctttactattttgcgtcgccacgttctgcataacgcgttaccgccggttattcctcgcctgggcttacagttttccaccatgctgacgctggcgatgatcaccgaaatggtttttagctggccgggtttagggcgctggttaattaacgccatccgccagcaggattacgcagccatttccgccggagtgatggtgtgtggctcactggtcattattgttaacgtgatttctgatattttgggtgccatggctaaccctctgaaacataaggaatggtatgccttacgatagcgtatacagcgaaaagcgcccgccgggcacgctgcgtaccgcctggcgcaaattttatagtgacgcctctgcgatggtcggcctgtacggctgcgcggggctggctgtactgtgtatttttggcggctggtttgcgccttacggcatcgaccagcaatttctcggttatcaattattgccgccatcatggtcgcgctatggcgaagtttctttcttcctggggactgacgacctcggacgcgatgttttaagccgtttactgagcggagctgcgccaaccgtgggtggcgcatttgtggtgacgcttgccgcgacgatctgtggcctggtactgggcaccttcgccggggcgacacacggcctccgctcagcggtgcttaaccatattctggataccttactggcgatcccttcgctgctgttggcaattatcgttgtagcgtttgccggaccgagtttgtcccacgctatgtttgctgtctggctggcattgctgccgcgtatggtacgttcgatttacagcatggtgcatgacgaactggaaaaagagtacgttatcgccgcccgtctggatggcgcatcaacgctgaatattctctggtttgctgtgatgccaaacatcaccgccgggctggtcaccgagatcacccgcgcactgtcgatggcaattctcgatatcgccgcgctgggctttctcgatctcggcgcacaactcccctcgcctgaatggggagcgatgctcggtgatgcgctggaactgatttatgtcgccccgtggactgtcatgctgccaggtgcggcaattatgattagcgtgttgttggttaacctccttggtgatggcgttcgtcgtgcgattattgcgggggtggaataatgccattactcgatattcgtaacctgaccattgaatttaaaaccggtgatgagtgggttaaagccgtcgaccgggtaagtatgaccttaaccgaaggtgaaatccgcggtcttgttggtgaatccggttccggcaagagtttgattgcgaaagcgatttgtggggtgaataaagataactggcgtgttactgctgaccgtatgcgttttgatgatatcgatttgctgcgtctctccgcacgcgaacggcgcaaactggttggccataacgtgtcgatgattttccaggaaccgcagtcgtgtcttgacccttcagaacgtgtgggtcgccagttgatgcaaaacatcccagcctggacctataaaggccgttggtggcagcgttttggctggcgcaaacgccgtgccattgaactgctgcaccgcgtggggattaaagatcacaaagatgcgatgcgcagttttccctatgagttgaccgaaggtgaatgtcagaaagtgatgatagccattgcactggcgaatcaaccgcgtctgctgattgctgacgaaccgaccaactcaatggagccaacaacccaggcgcaaatctttcgcctgctgacgcgtctcaaccaaaacagcaataccactattttgcttatcagccatgacttacaaatgcttagccaatgggcggataaaattaacgtgctttactgcggtcaaacagtggaaaccgcgccgagtaaggagttggtgacgatgccacatcatccttatacccaggcgctgatccgcgcgataccagacttcggcagcgcgatgccgcataaaagtcgcctcaatacgctgcccggcgctatcccactgctggaacagttaccgattggttgtcgtctggggccacgttgcccgtatgcacaacgagaatgcattgtgacgccacgtttgacgggggcgaaaaatcatctctatgcctgtcatttcccgctgaacatggagaaagagtgagatgatcgaaacgctgcttgaagtgcgtaatttaagtaaaacgttccgctaccggaccggctggtttcgtcgtcagaccgtagaagcggtaaaacccttgagctttacgctacgtgaaggccagacactggcgattattggcgagaatggttcgggtaaatccacgctggcaaaaatgctggcgggaatgatagagcctaccagcggcgagttattgattgacgatcatccactgcattttggcgattattccttccgcagtcagcgtattcgcatgatttttcaggatccttcgacctcgttgaatccccgtcaacgtatctcgcaaattctggattttccactgcgcctgaacaccgacctggaaccggaacagcgtcgcaaacagattattgaaacgatgcgtatggttgggctgctaccggatcacgtcagttactatccgcatatgttggcacccggacaaaaacagcgtctgggtctggcgcgcgcgctaatattgcgcccaaaagtcattattgccgatgaagccctcgcttcactggatatgtcgatgcgttcgcagttgattaatctgatgctggagttacaggaaaaacagggcatttcgtatatttatgttacccagcatatcggaatgatgaagcacattagcgaccaggtgctggtgatgcatcagggcgaggttgtcgagcgaggcagcaccgcggatgtgctggcatcgccgctgcatgaactcaccaaacggctgattgccgggcactttggcgaagcattgacagcggatgcgtggcgtaaagatcgctaattttctgaatcctccttccagattatccacctcattctgacaagagattaaatcttgtcagaatgaggtgatggataaaataaaatcaaatgcgcgtgatttaagacgcaatctcactttgcaggaacgaaagctctggcgatatcttcgcagccgacgttttggtgatttcaaatttcgccgtcaacatccggtggggagctacattctcgattttgcttgctgctcggcgcgcgtagtcgttgagctggatggtgggcagcatgatttggcagttgcctatgataccaggcgcactagctggcttgagtcgcagggctggaccgtgctgcgtttctggaataacgagattgattgtaatgaggaggcggtgccggagattattctgcaggaactgaaccgccgatcaccctcaccctgaaagggcgagggggccgaccgagccgaatagctgttgtggtgaaaacatggagacagtgctggagaatattcggcaaggtctgaaccatcccagccatcgccataaaagggttaggggctgtatgagcctgtttgttgctggggtaacaatatttgcacaatatggtcccctcgcccctctggggagagggttagggtaaggggaaaagcgcccaccctgccgcagcctgctccggtcggacctggcaactatagctactcacagccaggttgattataataaccgtttatctgttcgtactgtttactaaaacgacgaatcgcctgattttcaggcacaacaagcatcaacaataaggattaaagctatgggttttctttccggtaagcgcattctggtaaccggtgttgccagcaaactatccatcgcctacggtatcgctcaggcgatgcaccgcgaaggagctgaactggcattcacctaccagaacgacaaactgaaaggccgcgtagaagaatttgccgctcaattgggttctgacatcgttctgcagtgcgatgttgcagaagatgccagcatcgacaccatgttcgctgaactggggaaagtttggccgaaatttgacggtttcgtacactctattggttttgcacctggcgatcagctggatggtgactatgttaacgccgttacccgtgaaggcttcaaaattgcccacgacatcagctcctacagcttcgttgcaatggcaaaagcttgccgctccatgctgaatccgggttctgccctgctgaccctttcctaccttggcgctgagcgcgctatcccgaactacaacgttatgggtctggcaaaagcgtctctggaagcgaacgtgcgctatatggcgaacgcgatgggtccggaaggtgtgcgtgttaacgccatctctgctggtccgatccgtactctggcggcttccggtatcaaagacttccgcaaaatgctggctcattgcgaagccgttaccccgattcgccgtaccgttactattgaagatgtgggtaactccgcggcattcctgtgctccgatctctctgccggtatctccggtgaagtggtccacgttgacggcggtttcagcatcgctgcaatgaacgaactcgaattgaaataatcattctgttggtaaatattgggcggcgttctgccgcccgttatctctgttatacctttctgatatttgttatcgccgatccgtctttctccccttcccgccttgcgtcaggataacgatttcctttacgaccaaggagcgcccatggaacaacgccacatcaccggcaaaagccactggtatcatgaaacgcaatccagtactgcggagtatgacgttctgcctctggtcccggaagccgcaaaggtcagcgatccctttctgctcgacgtgatccttgatgaagaaacgctggctcccttcctttcatggctggtccctgcgcgcgttcttgcagtggaattgttccctgaccagcttaccgtgacccgttcacagaccttcaccgcttatgaacgcttgtctacggccctgacggttgctcaggtttgcggcgtccagcggttatgtaactactattcggcgcgacttacgccgctccccgggcctgattcctccagggaaagcaatcataggttggcacaaatcacgcaatatgcccgccaactggctagctcgccttctattatcgacaaccgatcgcgccagcatctgaatgacgtcggtcttactgcctgggactgtgtgatcattaaccaaatcattggttttattggctttcaggcgcggaccattgcgacatttcaggcttatctcgggcacccggtacgctggttacccggtctggaaatacaaaactacgccgacgcgtcactgtttgctgatgaatcaatacgctggcgaagcagctatgaggtggaaaaactacctgaagagtacacaaaaagttcaacagcagaactttgccaactggccgaaacactctctctccaccctatttcactttcccttctcgaaaggttgttaaacagtacacgggttaatacacagccggataataagcttgcggcgttgttatgcgcgcggataaatggcagtcctgcttgttttgccgcctgtatggattcatcaaatgaatataaaaaatcagcccccttctgcgcaagggcgaaaatgaaattaaccaatgggctgaccgtcattctgttgagcacgctaccgttcaggcgatacaatggctgacccgagcacccgatcgctttagcgccgcccagttcagccctttactcgaacacgaaaaatcatcaacgcagattattaatctgctggtatggagcgggctgtgtggctggataaatcgcttaaaaatcgcgttgggtgagacatattaaccttgccgcgtcagacagattcgcgtaaaactgtcagccgctctaatggccaccaaaatagacaattatgtttcaggacaacccgctgctagcgcagcttaaacagcaactgcattcccagacgccacgcgctgaaggggtggtaaaagccacagaaaaaggctttggcttcctggaagtcgacgcgcaaaaaagttatttcattccgccgccgcagatgaaaaaagtcatgcatggcgaccgaattatcgcggtgatccacagtgaaaaagaacgtgaatccgcagagccagaagaactggttgaaccgttcctgactcgtttcgtgggtaaagttcagggcaaaaatgaccgtctggccatcgttcctgatcatccactcttaaaagacgccattccttgccgcgcagcccgtggcctgaaccacgagtttaaagaaggcgactgggcggttgccgaaatgcgccgtcatccgctgaaaggcgatcgttctttctatgctgaactgacacaatacatcacttttggtgacgaccactttgtaccgtggtgggttacccttgcgcgccataatctggaaaaagaagcaccagacggcgtcgctaccgaaatgctcgatgaaggtctggttcgtgaagatctgaccgcgctggattttgtcaccatcgacagtgccagcacagaagatatggatgacgcccttttcgctaaggcgttgccggatgacaaacttcagctgattgtggcgattgccgatccaaccgcgtggattgctgaaggcagcaagctggacaaagccgcgaaaattcgcgcattcaccaactatctgcctggcttcaacatccctatgcttcctcgcgagctttctgacgatctctgctcactgcgcgccaatgaagtccgcccggtactggcatgccgcatgacgctctccgctgatggcaccattgaagataatatcgaattctttgccgccaccatcgaatccaaagcgaagctggtgtatgaccaggtttctgactggctggaaaataccggtgactggcagcctgaaagtgaagcaattgccgaacaagtccgtttgctagcgcaaatttgccaacgccgcggcgagtggcgtcataaccacgcactggtgtttaaagatcgcccggattaccgctttattctcggtgaaaaaggtgaagtgctggatatcgtcgccgagcctcgtcgcattgccaaccgtatcgtcgaagaagcgatgattgccgctaacatttgtgcggcccgcgttctgcgcgataagctcggttttggcatctataacgtgcatatgggctttgatccggcgaatgccgacgcgctggcagcgttgctgaaaacgcacggtctgcatgtcgatgccgaagaagtgctcacgctggacggtttctgcaaactgcgtcgtgaactggatgcgcaaccaactggtttcctcgacagccgcattcgtcgcttccagtcatttgctgaaattagcactgaacccggtcctcactttggcctcggtctggaagcatacgccacctggacttcgccgatccgtaaatatggcgacatgatcaaccaccgtctgctgaaagcggttatcaaaggcgaaactgcgacgcgtccgcaggatgaaatcactgtccaaatggccgaacgtcgccgtctcaaccggatggcagaacgtgatgttggcgactggttatacgcacgcttcctgaaagataaagccgggaccggcacccgtttcgcggcggaaattgtcgatatcagccgtggcggcatgcgtgtgcgtttggttgataacggcgctatcgcctttattccggcacctttcttacacgctgtgcgcgatgaactggtttgcagccaggaaaacggcactgtacaaattaaaggtgaaacggtttacaaagtaactgacgttattgacgtcaccattgccgaagtccgcatggaaacccgcggcattattgcgcgcccggtcgcgtaatctcctttcacggcccattcctcatggatgggccgtttatttccccgctctaccttcgttatatccaggcagattttttaactgactttcgtttgaaaactggcgtttttccaaaactggattacaaataaatatataaaaaaacaatgcgtttagccgccgttaatttcatgtaagtcatgttgttccttttatttaaccgcggactccgcagttaaccggaggatatgcatcatgaaaaccgttagggagtccacaacgttgtacaactttctcggatcgcacaatccatactggcggttgacggaaagcagcgatgttttgcgcttttctaccaccgaaaccacagaacctgatcgtactttgcagttatctgccgaacaggctgctcgcatcagggaaatgacggtcatcacctccagcctgatgatgagtctgaccgtcgatgagagcgatctttctgtgcatctggtaggacgaaaaatcaataaacgggaatgggctggcaacgcgtctgcatggcatgacacaccggcagttgctcgtgatttatcacacgggctttcctttgctgagcaggtagtttctgaagcacattccgcaatagtgattctcgacagccgggggaatatccaacgcttcaatcggttatgtgaagattacactgggttgaaagaacacgacgtcattggccaaagcgtgtttaaactgtttatgagccgtcgtgaagctgcggcatccaggcgcaataaccgtgtattttttcgaagcggcaatgcatatgaagtcgaactgtggataccaacacgtaaaggccagcggctgtttctgtttcgcaataaaataaatttgtccacagcggcagtggcaaaaacgagatttttttaatctgttccggtaccgacattaccgaagagcgccgcgctcaggagcgactgcgtattctggcaaataccgacagtatcaccggactgccgaatcgtaacgcaatgcaggagttaatcgatcacgctattaatcaggcagataacaataaagttggggttgtgtatcttgatttggataattttaaaaaggtcaacgacgcctatgggcatttgtttggtgaccagttattacgcgacgtgtcattggctattttaagctgtctcgaacatgaccaggtgttggcgcgtccaggtggcgatgagtttctggtactggcatccaatacctcacaaagcgcgctggaagcaatggcatcacgaattttgacccgcttacgcctcccctttcgtattggtttaattgaagtttataccagctgttcagtaggtatttcgctctctcccgaacatggttcggacagcgcgactattattcgtcacgccgacacagcaatgtacacagcgaaggaaggcggacgaggacaattttgcgtttttactccagaaatgaatcagcgggtatttgaatatctctggctggataccaacttgcgtaaagcactggaaaacgatcagttggttattcactatcaaccgaaaatcacctggcgtggcgaagtgcgcagtctggaagcactagtacgttggcagtcacctgaacgtgggttgattccaccgttggacttcatttcctacgccgaagagtcagggctaattgtgcctttaggccgttgggtgattctcgatgtcgtacgccaggtggcaaagtggcgggataaaggcataaacctgcgagtggcggtaaatatttctgcacgtcagctcgccgatcaaaccattttcaccgccctgaaacaggttctccaggaactcaattttgaatactgccctatagatgttgaactgacagagagttgtctgattgagaatgatgaactggcactgtctgttattcaacaatttagccaactaggtgcgcaagtgcatctggatgattttggtaccggctactcttcactttcgcaactggcgcgctttccgatcgatgccatcaaacttgaccaggtttttgttcgagatattcacaaacaacctgtctcgcagtcactggtccgggcgatcgtcgctgtggcccaggcattgaatcttcaggtgatcgccgaaggtgtagagagtgcaaaggaagatgcttttttaaccaagaacgggatcaatgagcggcaaggatttttgtttgccaaaccgatgcccgccgtcgccttcgaacgctggtataaacgctatctgaagcgcgcataagtagatgaatatatatacttagcgctatatcccgtcattatatatcgtattcctggatgataattagccgttgctgttaaacacttctcttttagcggcaatttttgcattattcattttccacttttgctataaggatgtccttgatgtctgaatttgatgcccagcgcgttgccgaacgtattgatattgtgttagatatccttgtggcaggcgattaccactctgcgatccataatctcgagatacttaaagcagaactcttgcgccaggttgctgaatctacgccagacatcccgaaggcaccgtgggagatttaacaatcgtgccttcaggttttcctatttgaggatgcccggcgcgtcagtatttttttatttagtattataacgttataagaattacagcgatgaattcccgacaacaaactattctacagatggtcattgaccagggtcaggttagcgtaaccgatctggcaaaagccactggagtttctgaagttaccattcgccaggatctcaacaccctcgaaaaactgagttacctccgccgtgcacatggctttgcagtttcgcttgatagtgatgacgtcgaaacccgtatgatgagcaactatacgctgaagcgtgaactcgccgagtttgccgcgtcactggttcaaccgggcgaaaccatctttatcgaaaatggcagcagcaatgccctgctcgcccggactctgggggagcagaagaaaaatgtcactatcatcacggtcagcagctacatcgcgcatttgctgaaagacgcgccttgtgaagtcattttgctcggtggcgtgtaccagaaaaaaagcgaaagtatggttggcccgttgacacgccagtgcatccaacaggtgcatttcagcaaagcatttattggtattgatggctggcaacctgaaactggattcaccggtcgcgatatgatgcgtaccgatgtggtcaatgccgtgctggaaaaagagtgcgaagcgatagtcctgactgacagctcgaaatttggtgctgtacattcatactccatcggtcccgttgagcgattcaatcgcgtgattaccgattcgaaaatacgcgccagcgatctgatgcatcttgagcacagtaaactcaccgttcacgtcgttgacatttaaccatttcccttctctacggatgatttgcagtttggcaaatcatccgctctaagatgattcctggttgataattaagactatttacctgttattaacacgcttaagatataaaattattatcagcgatataacaggaagtcattatcacctgcgtgatataaccctgcgcgcgagcagatttcacggaataatttcaccaggcttattcttagctattatagttatagagagcttacttccgtgaatcataaattcaggagagagtattatgtttgtaacgagcaaaaaaatgaccgcggctgttctggcaattactttggcaatgtctctgagtgcctgttctaactggtctaaacgggaccgcaacaccgcaatcggcgcgggtgcaggggcattaggcggtgcagtactgaccgatggcagtacgttgggtacattaggtggtgcagctgtcggtggtgttattggtcaccaggtcggtaaataatcgtaaataaatgtcgattatcgactcgcaattataatacgcttgattctgttcagtacgaaataactgaataatacgcacagtaaaatattcgaaagccacggatatatccgtggctttttatgttaaccgcctgcgagttttaccttcatccctttcgcttcaagtagtgattttaataaatcacgcttatcgccctggatttcaataactccatctttaactgctccgccgcagccgcattttttcttcagttccgctgcaagttttgtcagttcggcatcatcgagatcgacaccggtaatcaggcaaacgcccttacctttacgtccactggtctgacgctgaatacgcaccacaccgtcgcctttagggcgtacaggggccgctttgggctcatcaatacgtccggtttccgttgagtagaccagacggctgttggaatcactcatcatgcactccgctgtaaagaggcgttgatcgctttcagcgtctgcgctggatctaccgattgcgttaccgggcgaccaatcaccatataatcaacaccagccgacaacgcctgttctggcgtcataatgcggcgctggtcaccagcttcactcccctgcggacgaatgcccggcgtaaccagtttgaactcctgaccgaatacctgtttaaagcgcacagcttcctgagcagaacacaccacaccatcaaggccacatttttgcgtcagtgccgccagacgttctgcataatctgcaggtgacagtgtcatgccaagatcgaccaggtcgctggcttccatgctggtcaacactgtcacagcaatcaaaagcggtgcatctttgccaaacggaaccagtgcctcacgcgctgcggtcatcatacgcgccccaccagaggcatgaacattcaccatccacacgcctaagtcagctgcagcagcgacagcgtgcgctgcagtgttaggaatatcgtggaatttcaggtcaagaaagatatcaaaaccacgctgttgaagttcgcgcacaaactgtggcccaaacaatgtaaacatctctttgccgaccttcagacgacaatcgcgtgggtcgatcttgtcgacaaaggacagcgcgtcatcacgattatgataatcaagggcaacaaccacaggagaattcgtaacagcgcgggaagaagatgaagcagttaacgtcatgaccagaccttcttgatgatgggcaccggaagtggcgcgaaacaggtaaacggcgagcattctacccgtggaaataaaaaattaacagttgcgatttttcccctggcaggctttttctgctccgtcgttgccggagcacaatggaacatcaataactagtatgttgtaactaaagtcggatttttttaaaaattacaggccatcaagaccgcgaatcggtttaatggttgaccaggcccgacaagacggacaatgccagtagagggtgtatgcggtaaaaccacatttctggcagcgataacgaggcttactacgtaccttttcgccaaccatgtcacgcagcaccatcaggctctctttggcacgcccttcttccgcttcatttaagtggtaatccattaacttatggaacacacgcatggtcggatgacgctgaagctggcgcgtaatatagacctgtgcggcctcactaccgtcgcgcgcttcgatgatatcagcaagcatcaattcagcatcggcaccggtgttctcttccaccgcgcgttgcaggaattctgcccattcggcagttttacccaactgctgatagcaggtttgcaacatttccagcgtttcgctgaccagttctctgtcctgggatatcacgcgttgcaaactttcgacggctttggcgtattctcctttcgccataaacacgcgtcccatcatgatggatacgcgggcgctgtttttatctgccgccgcccctttttttagcaaggtcatggcacgatcgagatcgtcgctggccatatgctgcagggctaactcacagtagaaatgggcaatttcgacgcgctgtttatctttacccagcttcaccaggcgttcggcaacatcaattgctttctgccactcgctggtagcctggtagatttgtagcaactgttgcagcgcgccaatgcggaagtcagtttcatcggtcagctgattgaacatgtcttccgcgcggtcgtataacccggcggccatgtaatcacgccccagttgttgaatcgccaacagacgctgttcataggtcagtgaggcgctttccattagggtctgatggatgcgaatagcgcgatcaacttcgccacgcgaacggaacaggtttccgagcgtaaggtgggcttcaacggtgcctgtatcctctttaagcatatcgagaaacaggtctaccgctttatcctgttgattactaagcaggaagttaacccccgctacgtaatcacgcgacaagcggttggcttcatcttgcttgttttgttgcgcacttctgcggcccatataccagccataggcagcggctacaggcaaaagcagaaacaacaactccagcatagaaagttattccttcgccgctgacgagtgcggcactacagccacgtcagtcgcgggtgaaagctggttttccagtcgctttattttacgttcagcgcgcgccagggaaacacgaactcgcagccagaacaggccacaaatcaaccaaccgatagcaacccccgcagcaaacaataccgccagcaatgtggaaatacggtactccccttgcgctaacagataattaaacgtcacctgttgatcgttctgcgcacccaacgtgaccgaaatcacgaagatcgctaacaccagtaagaaaatgagtaaatatttcacattacttcccgttatgtggttaaagcgaataaattatggtcaacttaccgcaatagccctttaaagtaccattttcgcgccgtctgcgaaatggcatccacgcgcattgttgatgatttaagggctaaattcggaaaatcaaccagcgttaactttcttgttctcgttgcgctatttcgcgattttcttccgcaggtggtgttaatggcccacaaattcgttgcgcaagccacgttgccaccgccaccagcgcccacgaaatcaacgtagctactaccagatcgcgtggccaatgcatcccgagcagcaggcggcttcccatgactcccgttgcccagaccagcaagatagcaatggttaacgttcgccgacgcggccacagcaaaccaacggccagcagtgcccaactggcagcaaacatcgtgtgaccggaaggaaaggcaaaccccgtctctttctgccagtgtgaacgcaaatattgtgggatatttttctcttcagccaactgttctttcactagatttccgcgttctgctcgctttaaagtgtagaactcatcaaccggaatatgatgtgttttttccagccagataacaaaaggtcgtggttcctggactttgtctttgatccaggatttaacgccttgtcccacaatgattacggccgccagaatggcaaataatacaaaggcagccttaatgcgaaaacgcagacaccagagaaaccagccgaataaaatcaaatgtgtaatgacgccccagggctgggtgacagtttcagtaacccaaaaagccgcttttagtagccaactttgttctccaggttgccaacgccagccagaaatccatacggctactggcatgacaagcaatagtgcagctcccactgcggtacgtctggcaatcgaacgcatggcctctcctttttgataagtcccacaatcataactgaaaacgccagttccaggaaaaattgacagatttgtgccattccgtgaacgatcgacgcgtcgtgattaggtgaaccccttctcgttatggcaaaataagccaatacagaaccagcattatctggagaatttcatgcagcttaaacgtgtggcagaagccaaactgccaaccccatggggcgatttcctgatggtgggatttgaagaactggcaaccggacacgatcatgtcgcgctagtctatggcgatatttccgggcataccccggtacttgcgcgcgtccattccgaatgtctgaccggtgacgccctgttcagcttgcgctgcgattgtggcttccagctcgaagcggcattgacgcaaattgccgaggaaggccgtggtattttgctgtatcaccgtcaggaaggtcgtaacattggtctgctgaataaaatccgcgcttacgcactgcaggatcaaggttacgataccgtagaggctaaccatcagttaggcttcgccgctgatgagcgcgacttcactctttgcgctgatatgttcaaactccttggcgtcaatgaagtccgcttgttaaccaataacccgaaaaaagtcgaaattctgaccgaagcagggattaatattgttgaacgcgtaccattgattgtaggtcgtaaccccaataacgaacattatctcaataccaaagccgagaaaatgggtcatttgctgaacaaataaccctctcgcattgtggaattaatttgcttgccggaagcaaaataaccggcaagcaaatatttgttacttcagcatattacgaatgacataatgcaaaatgccgtcgttctggtagtaggtcaactccgtcgcggtgtcgatacgacaacggcagggtacgacctcctggctaccatccgcgcgcgtaagcgtcaccggaaccgtcgcaccgggttgtagattttgcagatcgccaatatcaatcttctcttccccggttagtcctaacgttttacgcgttacgccttgcggaaattccagcggcaggatgcccatgccaattaaattcgaacggtgaattcgttcaaacgattcggcaatcaccacacgaattccaagcagacgaggaccttttgccgcccagtcacggcttgagcctgaaccatactctttcccggcaatcaccgccagcggcgtttgttcctgcttatagcgcatcgcagcatcataaatagagactacgtcgctgtcaggtaaatgccgcgtcatccccccttcaacgccaggcaccatttcattacggatgcgaatattggcgaaggtgccgcgcatcatcacttcatggttaccacgccgcgaaccgtaggagttaaagtcttttcgctcaacaccccgaccttgtagatatcgacccgctgggctgtcgggcttaatactgcccgccggagagatatggtcagtggtgactgaatcccccagcattgcgaggatccgcgcaccgtgaatatcttccactggtgctggtgttgcctgcatttcatcaaagaaaggcgataagcgaatataggttgagtcctcctgccaaccgtaggtatcggatcgtgtgacgttaatttccttccactctgctgtgccttcaaaaacttctgcgtactctttgcggaacatttctgtggagacttgttctaccgcacgggcaatttcttgtgccgatggccagatatctttcagataaaccggatcgcctttacgatcatgaccaataggctcagaagccaggttgatattcatatttcccgccagcgcataggcaaccaccagcggcggcgaggccagccagttggttttaaccagcggatggatacggccttcaaagttacggttgccggacagcactgcaccgacggttaaatcgccttttttgattgccgtttcgataggatcgggcagcggcccagagttaccaatacaggtagtacaaccgtatcccacaaggttaaaccccagttcgtcgagaaacggtgtcagtttcgcttttgccagatagtcagaaacaactttcgagcctggtgccagcgacgctttgacccacggttgccgcttgaggccaagaattacggcttttttcgccagcaagcctgcagccatcagcacacttgggttagaggtgttggtgcacgaggttatcgcagcaatgaccacagcgccatcaggtaactgatactgatgtccgttcataacataatcgaccggctggcgatctttatgcgtggcattcacttccagttcgttactggcggcaaatacttttggtacatcgggcagtgcaacgcgatcctgtgggcgttttggccctgccaggctcgcttcaacgtcattcatatccagttctaacgtactggtaaaaatcggttcatcgcccgggttacgccacatgccctgcgctttggcatatttttcgaccaactcaacctgatcttcgctgcgcccgcttaaacgcatgtaatcgagggttacagcatcgattgggaagaagccacaggtggcaccatattctggcgacatattggcaatggtggcgcgatccgccagcggtagtgaatccagaccatcaccataaaattcgacgaatttctccaccacgccatgtttgcgcagcatttgggtaacagtgagaaccaggtctgtggcggtaataccttcacgtaatttaccggtaagtttaaagcccactacgtccgggataagcatggaaaccggctggcctaacattgcggcttctgcttcgatcccacccacgccccaccccagcacgccaaggccgttgatcatagtggtgtgcgagtcagtaccaacgagtgtatccggataagcaatccattcaccgtcctgcaattcactccacactgctttgccgagatattcgaggttaacctgatggcaaatgcctgtgcctggcggcacgacgctaaaccgactgaacgcttgctttccccatttcaggaacacataacgttcgtggttgcgctccatttccaggcgtacgttttcttcaaatgcctcatcatcaccaaaacgatcgacggtcaccgagtggtcaatgaccaggtcgaccggtgagagcgggttaacctttgcagtatcgccgccgaggcgtttaaccgcttcgcgcattgccgccagatcaacaacggcaggtacgccggtaaagtcctgcatcaacacccttgccgggcggtaggcaatttcacggtcagcatgggcatttttcagccatcctgccagcgcgtggatatcctcttcggtaaccgagttaccatcctgccagcgcagcaggttttcgagcaaaactttgagtgacttgggtagacgggtgatatcgcccagtgatttagcagcaagcggcaggctgtagtagtggtaagttttatctttggcctgcaacgtgtccttactggcttctcgtagggttgacgacatagctcctccttaatgacagggttgcgaagccctgattctcttcagggtgaatattaaagataacacaaacatcgcgtaacgatttgataacaacccaaattgataaaagaggagaaaccttgtggcaaagcaaatgacaaccccgccgcagcggggtcaaggatcagtgagtaatgatccagaggagttcggcccagaagagcatcgacagagaaaacgcgcccatccaggaccaatatttcatatttgtgttgatcataggctacacccttaacggttattattttgtgttgagataactcaagctgttattgctgcggtgtattaaaagccctttaattcattaaaaatgggtaataagaatgatgataattattgtttcggctgatcatcttcagcaaacagttctataaaggcttgctgctgcgatgttagttgccagtcgtctggaataacgacggaacattcccgtttcgtttctgtttcattgtcactatgctggcataatggtgacgactccagttgctcctgaccgaccatagttatccccacactttccaaatcagcagtgcgacaaccacccagaaaagtgcagaaccaagaaaaaccgccagccaggctttacgttttaattcaggatcgcggcggggttcctgatttccagaaggcattgctaacctcatataatcgccatcacttatcagcaagacgttgaacgattggtgtaattaatcatacgatgagacaaatcctaaagaaactttagtcaaaaatcggtgatgctgccaacttactgatttagtgtatgatggtgtttttgaggtgctccagtggcttctgtttctatcagctgtccctcctgttcagctactgacggggtggtgcgtaacggcaaaagcactgccggacatcagcgctatctctgctctcactgccgtaaaacatggcaactgcagttcacttacaccgcttctcaacccggtacgcaccagaaaatcattgatatggccatgaatggcgttggatgccgggcaactgcacgcattatgggcgttggcctcaacacgattttacgtcacttaaaaaactcaggccgcagtcggtaacctcgcgcatacagccgggcagtgacgtcatcgtctgcgcggaaatggacgaacagtggggctatgtcggggctaaatcgcgccagcgctggctgttttacgcgtatgacagtctccggaagacggttgttgcgcacgtattcggtgaacgcactatggcgacgctggggcgtcttatgagcctgctgtcaccctttgacgtggtgatatggatgacggatggctggccgctgtatgaatcccgcctgaagggaaagctgcacgtaatcagcaagcgatatacgcagcgaattgagcggcataacctgaatctgaggcagcacctggcacggctgggacggaagtcgctgtcgttctcaaaatcggtggagctgcatgacaaagtcatcgggcattatctgaacataaaacactatcaataagttggagtcattacccaaaaatccagcgaatttacgaatcgtctccagtgaataattcaatcttttgacctgaaatagatatttgaaaactggagtttgcgaggcgggtaattagacactactttacaggtaatttaccctataaatatgagggataaaaatattgtgcacggtatagaaataagtaacaaaagagaatatattccggcaccttcgctacataaaaggtgccgaaaataacgcaagaaattatttttccggcagttttatatctttaaacatgacctcaatttcttcattagagcgcaatgcgacagccgcatcaacgacatcacgcgttaaatgcggtgcaaaacgctgaatgaaatcatacatataactgcgcaagaaagtactacggcgaaaaccaattttggttgtactgtggctgaagatatcgtgagcatcaacacgcacaaggtcgggatcggcgaccggatccaccgccatgctggcaatgacccctacccccagccctaaccggacgtaagttttaatgacgtcagcatccgttgccgtgaagacgatacgcggcgttaaccctgcgcggttaaaggcagtatccagttctgaacgtccggtaaagccgaaggtatatgtcaccaacggatattgcgccagttcttcaatggtaatggcttttttgcctgccagcgggtgatccggagtgactacaatagcccgattccagtggtagcacggtaacatcactaaatcttcatacagatgcagcgcttctgtggcgatagcgaaatcagcattgcctttagagacggcatcagcaatttgtgtcggcgagccctggtgcatatgcaaagaaacgcggggataacgctcaataaagcctttgataacgtttggtaacgcgtagcgtgcctgggtatgcgtggtggcgatatacagtgagcctttatccggccaggtgtgctctccggcaaccgattttatggcatcgactttcgacaggacttcgcgagcgatacgaattatttcttgccctgctggcgttacctgcgtcaggtgcttgccgcttcgggaaaaaatttgaatgcctagctcgtcttccagcattctgacttgtttactgatcccgggttgtgatgtgtaaagtccttccgctgttgatgagacattcaggttatgattgaccacctcaacaatatagcgaagttgttgtaatttcatgttaaaccatccacttagacgccatcagaacatcgttttttcgtcacacctggcgggtgactaatacgatttaataataaaaaaggtgctaactataaccactatatcatttatagccttagtgtataggtgtgaagaaaaaataatatgcaataaaaaagggccgctttcgcgaccctttgtttataaaaacctgacagaattaaaggttatttttttccttcaacccatttgccatcaacataaaatgctgaccagccagtcgcctttccgtctttttccgaagagacatattgctgtttggttttacggctaaagcgaaccatggtcttattaccttccggatcctgctgtggcgcatcggccagataacgcagtttttccggcagacggtcgcggaagcgataaagctcttccaccagtggcgcacgcgtttcacgcgatttcgggaaagtgttggcagccaggaaaacacccgcagcgccgtcacgcagcacgaaataagcatctgatttttcgcacggcagctcaggtaatggcaccggatcttctttcggtggtgccacttcgccgttacgtaaaatcttacgtgtgtttttacactcttcgttggtgcaggccatgtatttaccgaaacgccccattttcaggtgcatttcagagccacatttttcacactcaacgatcgggccgtcataacctttaatgcggaattcgccctcttcgatctcgtaaccgtcgcaggttgggttattaccacagacatgcaacttacgtttcggatcgatgagatagctgtccatcgccgtgccgcatttcgggcaacgacgttttgcgcgcagcgcgttggtttcagcgtcttcgccttccagtacgttcagcacttcgttttccggcaccaggttaatggtggttttgcaacgctctttcggcggcagcgcataaccagaacagccaaggaataccccggtgctcgctgtgcgaatccccattttgcgaccacaagtcgggcagtcaatgctggtcagaaccatctggttcgggcgcataccaccctcttccggatctttttcagctttatctaactgctgggtgaaatccgagaagaagtgatccagtacagctttccactctgcttcgtgatttgccaccaggtcgaggctgttttccatctgtgcggtgaagtcgtagttcattaactcgcggaaattttcttcaaggcgatcggtgacgatttcgccaattttttccgcatagaaacgacgattttctactcgcacgtagccacgatcctgaatggtcgaaatgatcgacgcataggtagacggacgaccgataccgcgtttttccagctctttaaccagcgatgcttcactgaaacgggctggcggcttggtaaagtgctgggctggtgtaagttcaacgagcgtcagagcatcgcctttattaactgctggtaagatgcgatcttcatcgcctttacgcaacgcaggcatcacttttgtccagccatcaaaacgcaaaatacgaccgcgtgctttcaggcggaaatcgcccgcaccaatggtcagcgtcgtggagtcatatttcgctggggtcatctggcaggctacgaactgacgccagattaactggtacagtttctgcgcatctgcttccatatccttcagcgattccgccatcacattgacgtcagaaggacgaatcgcttcgtgcgcttcctgtgagttttctttgctggcgtactgattcggactttccggcagatatttcttaccaaaattatcgctgatataaccacgaaccatatttaccgcgtcctgactcaggttagtggagtcggtacgcatgtaagtgatatagcctgcttcatacaaacgctgcgccatcatcatggtttttttcacgccaaatccaagacgggtgctggcagcttgttgcagcgtagaggtaataaaaggagcgccaggtttactggttgtcggtttgtcttcacgttccagcacgctgtagcgcgctttttccagcagacttaccgcagcctgagtttgttctttgttgaccggacggaacggtttgtcgttctgatgagtcacctgtaacgccaacgcttcaccagatggcgtggtcgtgctggcatcgacttcccagaactcttccggcacgaacgctttaatttcacgctcacgctcgaccaccaggcgaaccgccaccgactgcacacgaccggcagacagaccacgagcgatctttttccatagcagcggcgaaaccatataccccaccacgcggtccataaagcgacgcgcctgctgggcattaacacgatcaatattcagctcacccggtttgttaaatgcctggcggatcgcgtttttagtaatttcgttaaacaccactcggctatagcgcgcatcatcacccccaatcacttcccgcaggtgccatgcaatggcttccccttcgcggtcaaggtcggttgcgagatagatgtggtcggctttttcagccagttgtttcagttcagagacgaccttctctttaccaggcaacacttcatagtgcgcctcccaattgtgccacgggtcaacccccatacggttgacgagagcgccacgttcatcctttttaggctttttagccgtcttggtggaggtagagtcggcactctttttggcagctgagccactggtcggcaaatcgcggatgtgaccgacgctggatttcaccacgtagtcactacccagatacttgttgatcgttttggcttttgccggggactcaacgatgacaagagctttacccatattcaccttacctaatttgattcttccaggaatgcgtcgcacgttgataaaccttccactggcaacgagttaccgatatggactcgttctctgcggatatcaaccccttgtcgtgactctgttcacgaaaattcaggtgactgagttaacaggtcttggcctacaggcgctatagcacgacggaattttggtcgaatgtcaagcaaatctattgccagattgacgaaagcgtcacactgtacctgataaaatccgatacgcaactttattagcatgcaaaatccaaagttgccagtaaggcgctcttgccaccagcgtggtatatttgtctgcaagccatgcctggcgtagactaatgtccttgtttaaggagtaaataatgaacaaagagacacaacccatcgaccgcgaaacgctgttgaaagaggccaacaaaatcattcgtgagcatgaggatacgctcgcagggattgaagccaccggcgtcacgcagcgtaatggcgtgctggtatttatcggcgactactttttagatgaacaaggattgccaacagccaaaagcaccgcggtgtttaatatgttcaaacacctggcccatgtgctttcagaaaaatatcatctggttgattaaagcaaaacgcgaggtcttagcctcgcgtttgtcttttacatcaatggcttttgaccccgctgccaccagcgtagcaacaatcgatcggcgctctctgccgcgctgccggtgaatcggtcaatgagtcgtttacgctgcatatagcgtacattaaccacttcacggccttccatcaggctaagaataacttcatcactggtgttgatttcatcaaccaggcctttctctaccgcctgttgtccgtaccagtgttcacccgttgccacctgttcaatatccagagacggacgcatacgcttcacaaaatctttaaataactgatgcgtttcgttcagctcttcgcggaatttctcccgcccttcttcggtattttcacccagcaaggtcagcgtgcgcttatactgcccggcggtgtgcagttcgatatcaatatctttgcttttcaggaagcggttaaagttgggcatttgcgccaccaccccaatggaacccacaatagcaaacggtgcggaaacaattttgtccgccacacaggccatcatgtaaccgccgctggcagcgactttgtctaccgtaacagttaaaggaatgtttttatcacgcagacgctgcagctgcgaagccgccaacccgtaaccatgcaccatgccaccagggctttccagacggagcacaacctgatcctgcggtttgaatgctgcgagtaccgccgttatctcttcacgtagcgagttcacttcatgggcgtccatgctgcctttaaaatccagcacccagacgcgaggtttactgtcagttgccacctcgcccagtttggctttcgcttttgctgctttcgcttcttgcttgtgctttttcttctgcgctttgtgccactgtttttgctgatgtgagtccatcagcgccgcggccagttcttctttcatctccttatactgttcgctgagattgttgacccgtaactcgccacgctggcgtttattacgttgagcaacattgacaataatggcggcaatcgccgcaatcgctagcacaacggtaacgattttcgccaaaaacaaaccatattcagacaacaattccacgagtccccaccttggttaaacaacgctttggctcacagtttacaacaggcatgttaagccgtctcgcagagatgttattgcagcgaaagtatgacaaagtatccattttgcggtgttatcgccccaggctgattgaaatgcccttctgtttcaggcataaagccccaaagtcataaagtacactggcagcgcgacagacaacgtcgttgaggagtagccatgcattaccagccaaaacaagatttactcaatgatcgcattatcctggtgacgggagccagcgatgggattggtcgtgaagccgcgatgacgtatgcacgctatggtgcgacagtgattctgttgggccgtaatgaagaaaaattacgtcaggtagccagccacataaacgaagaaactgggcgtcagccacagtggtttattctcgatttgctgacctgcacgtccgaaaattgccaacaactggcacagcgcattgtcgttaattatccgcgtctggatggtgttttgcataatgccggattgctcggcgatgtttgcccaatgagcgaacaaaatccgcaggtctggcaggacgtcatgcaggtcaacgttaatgccacctttatgctcacccaggcactgcttcctttattactcaaatcggacgccggttcactggtctttacttcatcaagcgttggacgtcagggacgagccaactggggtgcatatgcagcgtcgaaatttgccaccgaagggatgatgcaggtactggccgatgaatatcagcagcgcctgcgcgtcaactgcattaacccaggcggtacgcgcaccgcaatgcgcgcaagcgccttcccgaccgaagatccacagaaacttaaaacacccgctgatatcatgccgctctacctctggctgatgggcgatgacagccgccgtaaaaccggcatgacctttgacgcccaaccgggccgtaaaccaggaatttcccaatgagtgatgaacgctaccaacagcgtcagcagcgagtgaaagaaaaagtagatgctcgtgtggcccaggcccaggatgaacgcggtattatcatcgtctttaccggcaatggaaaaggcaaaaccaccgcggcatttggtacggcaacacgcgcagttggtcacggaaaaaaagtgggcgtcgtgcagtttattaaaggcacctggcctaatggcgaacgcaatctgctggagccacatggcgttgagtttcaggtgatggcaacgggctttacctgggatacacaaaaccgcgagtctgataccgccgcctgccgcgaagtctggcaacatgcaaagcggatgcttgctgattcctcactggatatggttttgcttgatgaactgacgtatatggtggcgtatgactatttgccactggaagaagtggtgcaggcgttaaatgaacgtccacatcaacagacggtgattatcacgggtcgaggctgtcatcgggatattcttgaactggcggatacggtaagtgagctgcgccccatcaaacatgcgtttgatgccggtgttaaggcgcaaatagggattgattattaatctgtaaaaatgccggatatgacgtccggcatactttgattaaccgttattacgcccgccagaacgacgaccgccgctcacctgactgtgacgtttcaccgcacgacgaatctgattagccttcatgcgacgacggtctttttctacagcgactttagagctggtttctggcggaagctccaccagttcgcgcagatagttagtctgggcgaggtccagctccgtccagccaccgcgtggcagaccttttggcagtgggatatcaccgtaacgaacacggatcaggcggctcacctgcacaccaaccgcttcccacagacgacgaacttcacggttacggccttcggtcagagtcacgttgtaccactggttgatcccttcgccgccgctgaacttgatggttttaaaagctgccggaccatcttccagttgcacgccacgactcaaatcacgcagtttcgcgtcgtcaacctgaccaaatacacgcacggcgtattcacgttcaacttcacggcttggatgcattaaacggtttgccagttcaccatcggtggtgaacagcagcagaccacaggtgttaacgtccagacgacctacggcaatccagcgtgcgccacgcagctttggcagacggtcaaacaccgtcggacgcccttccggatcgttacgggtacacaactcaccttccggtttgtaataggccagaacgcgacaaatttgttcagcggactcacgtaccgaaatcagatgaccatcgatacgaattttcagcccaggggtaacttcaacgcgatcgccgagtttagcaattttgccatcaacactcacacgaccggcttcaataatagattcgatttcacggcgggagccgtggccagcgcgggccagcactttctgtaatttttcgctcatagagcttccttttggtgtcgccttcccaggcgtctgatatgcttttgtgcaacagtgagtcagaacttacatctgactcactgatagtaaagtctgtttgaactcttcaggccttaagtaaacgactcgacgttttaactggcctggctttgaggcgcaacatactacactatctttatggttaaagcttgtttcgattaacatcagcttaattaccagccaccaccgcctccgccacccgcgccgccaccagcaccaccaccggaataacttcgccccaacaaactggttttggcccccagactcaggtgcatctgtaatgaaaacaaaacgccactacgggcaatttccggggcgctaacagccgctgtgagtgatggggtgatacgtgctacccattctcttccaaggtttgctgagactgcccaacctagcaacgcgtaatccagtttccgtgtttcccctttccgccgacgcccactgtgtgttgctgcctctttacgcgcaagatagttaacgatagcttcaccgtgggcataacgttgctgcccagtttgtgtaaactttggcagaaaaatataccccatgccagtgagataaccggtcaggaaaacagcgctaaaataacccgctggcatataccagtaaaagaatacatctccgacattgatgtagagagaatagaaggccacgcctgaacaaatcagtggtaaacaattcttccgtcctcaaggatgcggccatttcgatatgtgtcgccctcttctccagtaaagagatcgatttcgctaaatggattacccgcgatatcagggaacttgagtgaaaatcgggtcttatagatttcaaacggccagtggttaccagtcacgttccagattaacagatctgaatctccctcacgcaggaaagcatttttaacctgataatgaatttgataatgatagtcgccttgaggcaagaaacgttgtttatcgcccacgacaatactcattaacccgatatgccagtcatgatgccagggttcaggaataccatcacgggtgacgccaacaatatgatagttcagcagtgcagcgtccccatcaggctgcatccagagtcgtggtaaatcacgataaaatccgtgtttaatctgctgatttcgcgcctgaaaatgaatattttctttgatgtcgagcaccccatccggttgcagagtggcttcaacatcaaagagcgaaatcccttcttcataagaagggatctccgtgttttctgcataacttagagatgatacaaatagccctgctatcaacagcaaaatgcagcgaaacttccctgccatagtcttccatccgtggaacgcaatttgttataagaaaggcttcacatcacctacgccttcacgcaccacgaccggcgtatcatcggtaagatcaataaccgttgtcggtttctgcccgagatagccgccgtgaataatcaaatctacctgtttttccagacggtctttaatttcttcgggatcggattcggtaaattcgctgcctggcagcattagcgaagtggaaagcatcggttcgcccagtgcttcaagcaacgcctgcgcaatcgggttagaaggcacacgcataccgatggttttgcgtttttcctgcaacagacggcgtggcacttccttcgtccccttcaggatgaaggtatagttgcccggcgtgttgtttttcattaaacgaaacgcaacgttatcaacaaatgaataggtcgagagttcagaaagatcgcgacacatcagggtaaagttgtgaccgtccggcagctggcgaatacgacaaatacgctccatcgcgtttttatcttcaattttacagccgagcgcatagccggaatcagttggataaacaatcaccccgcctttacgcacgatctccaccgcctggttgatcagacgttgctgtgggttatcaggatgaatataaaaaaactggctcataattccctctctgtggtgttctgcggctgttcccatagctgccagacgccttcaacgcctgcgggcagccagagtttacgacctagttcgatccacgggcatggctgatgaaaatcagatccttgtgatgcccataaatgatgctgacgcgcaagggccgccagctgggtacgttcattgggcgattgctggcactgcgcgacttccatcgcgtcaccgtggtgttcggcaaaatgcgcaaccaatcttttcagccatttagcactaagattgtaccgcccaggatgagctagcaccgccttaccgccagaatgatgaatgacatcaatagcttgttctattgtacaccactgtggcggaacgtatccggttttcccgcgcgccagatattttttaaagacatccgccattgaactggctttgccgcaccccacaaggaaacgcgcaaaatgaccgcgcgtcaccgcaccgccctgcgccagtcgtcgcgcgccttccagtgcccctggtatttgcgctttttcaagtctttcggcaatcagttgcgcccgctgattgcgccgttctgtctgctgcgcgaggaactcacacattagcggatgagtaatatcaatattcagcccgacaatatgaatttcatgattttcccagaccgtggaaatttccacgccgggaataagattcagcgccagtcccgaacgtgaaatttcctctcttgctggcacgattgcagctgtgttgtcatggtcggtgatcgccagggtaccgacgcgcatctcgactgcacggtgcaccaatacttctggcgtcaggcagccatcggaagctgtggtatggctgtgcaggtcgtaaatcactgcgtaattcgtgtcgctcaaggcgcactcccgttctggataatgttttttgcgccgacatcataacagttctggcaaatattctgaaatcagctgttgacaattaatcatcgaactagttaactagtacgcaagttcacgtaaaaagggtatcgacaatgaaagcaattttcgtactgaaagcttggtggcgcacttcctgaaacgggcagtgtattcaccatgcgtaaagcaatcagatacccagcccgcctaatgagcgggcttttttttgaacaaaattagagaataacaatgcaaacacaaaaaccgactctcgaactgctaacctgcgaaggcgcttatcgcgacaacccgactgcgctttttcaccagttgtgtgggaatcgtccggcaacgctgctgctggaatccgcagatatcgacagcaaagatgatttaaaaagcctgctactggtagacagtgcgctgcgcattacagcattaggtgacactgtcacaattcaggcactttccggcaacggcgaagccctgctggcactactggataacgccctgcctgcgggtgtggaaaatgaacaatcaccaaactgccgtgtgctgcgcttcccccctgtcagtccactgctggatgaagacgcccgcttatgctccctttcggtttttgacgctttccgtttattgcagaatctgttgaatgtaccgaaggaagaacgagaagcaatgttcttcggcggcctgttctcttatgaccttgtggcgggatttgaagatttaccgcaactgtcagcggaaaataactgccctgatttctgtttttatctcgctgaaacgctgatggtgattgaccatcagaaaaaaaacacccgcattcaggccagcctgtttgctccgaatgaagaagaaaaacaacgtctcactgctcgcctgaacgatcttcgccagcagctgaccgaagccgcgccgccgctgccggtggtttccgtgccgcatatgcgttgtgaatgtaatcagagcgatgaagagttcggtggcgtagtgcgtttgttgcaaaaagcgattcgcgctggagaaattttccaggtggtgccatctcgccgtttctctctgccctgcccgtcaccgctggcggcctattacgtgctgaaaaagagtaatcccagcccgtacatgttttttatgcaggataatgatttcaccctgtttggcgcgtcgccggaaagttcgctcaagtatgacgccaccagccgccagattgagatctacccgattgccggaacacgtccacgcggtcgtcgtgccgatggctcgctggacagagacctcgacagccgcatcgaactggaaatgcgtaccgatcataaagagctttctgaacatctgatgctggtggatctcgcccgtaatgatctggcacgcatttgcacccccggcagcagctacgtcgccgatcttaccaaagttgaccgttactcttacgtgatgcacctggtctcccgcgtggtcggtgagctgcgccacgatctcgacgccctgcacgcttaccgcgcctgtatgaatatggggacgttaagcggtgcgccgaaagtacgcgccatgcagttaattgccgaggcggaaggtcgtcgccgcggcagctacggcggcgcggtaggttatttcaccgcgcatggcgatctcgacacctgcattgtgatccgctcggcgctggtggaaaacggtatcgccaccgtgcaagccggtgctggcgtagtccttgattctattccgcagtcggaagccgacgaaacccgtaataaagcccgcgctgtactgcgcgctattgccaccgcgcatcatgcacaggagactttctgatggctgacattctgctgctcgataatatcgactcttttacgtacaacctggcagatcagttgcgcagcaatgggcataatgtggtgatttaccgcaaccatattccggcgcagaccttaattgaacgcctggcgacgatgagcaatccgatactgatgctttctcctggccccggtgtgccgagcgaagccggttgtatgccggaactcctcacccgcttgcgtggcaagctgcccattattggcatttgcctcggacatcaggcaattgtcgaagcttacgggggctatgtcggtcaggcgggcgaaattcttcacggtaaagcgtcgagcattgaacatgacggtcaggcgatgtttgccggattaacaaacccgctgccggtggcgcgttatcactcgctggttggcagtaacattccggccggtttaaccatcaacgcccattttaatggcatggtgatggcagtacgtcacgatgcggatcgcgtttgtggattccagttccatccggaatccattctcaccacccagggcgctcgcctgctggaacaaacgctggcctgggcgcagcagaaactagagccagccaacacgctgcaaccgattctggaaaaactgtatcaggcgcagacgcttagccaacaagaaagccaccagctgttttcagcggtggtgcgtggcgagctgaagccggaacaactggcggcggcgctggtgagcatgaaaattcgcggtgagcacccgaacgagatcgccggggcagcaaccgcgctactggaaaacgcagcgccgttcccgcgcccagattatctgtttgctgatatcgtcggtactggcggtgacggcagcaacagtatcaatatttctaccgccagtgcgtttgtcgccgcggcctgtgggctgaaagtggcgaaacacggcaaccgtagcgtctccagtaaatctggttcgtccgatctgctggcggcgttcggtattaatcttgatatgaacgccgataaatcgcgccaggcgctggatgagttaggtgtttgtttcctctttgcgccgaagtatcacaccggattccgccacgcgatgccggttcgccagcaactgaaaacccgcaccctgttcaatgtgctggggccattgattaacccggcgcatccgccgctggcgttaattggtgtttatagtccggaactggtgctgccgattgccgaaaccttgcgcgtgctggggtatcaacgcgcggcggtggtgcacagcggcgggatggatgaagtttcattacacgcgccgacaatcgttgccgagctgcatgacggcgaaattaagagctatcaattgaccgctgaagattttggcctgactccctaccaccaggagcaactggcaggcggaacaccggaagaaaaccgtgacattttaacacgcttgttacaaggtaaaggcgacgccgcccatgaagcagccgtcgctgcgaacgtcgccatgttaatgcgcctgcatggccatgaagatctgcaagccaatgcgcaaaccgttcttgaggtactgcgcagtggttccgcttacgacagagttaccgcgctggcggcacgagggtaaatgatgcaaaccgttttagcgaaaatcgtcgcagacaaggcgatttgggtagaaacccgcaaacagcagcaaccgctggccagttttcagaatgaggttcagccgagcacgcgacatttttatgatgcgctacagggtgcacgcacggcgtttattctggagtgcaagaaagcgtcgccgtcaaaaggcgtgatccgtgatgatttcgatccggcacgcattgcctccatttataaacattacgcttcggcaatttcggtgctgactgatgagaaatattttcaggggagctttgatttcctccccatcgtcagccaaatcgccccgcagccgattttatgtaaagacttcattatcgacccttaccagatctatctggcgcgctattaccaggccgatgcctgcttattaatgctttcagtactggatgacgaccaatatcgccagcttgcagccgtcgctcacagtctggagatgggggtgctgaccgaagtcagtaatgaagaggaactggagcgcgccattgcattgggggcaaaggtcgttggcatcaacaaccgcgatctgcgtgatttgtcgattgatctcaaccgtacccgcgagcttgcgccgaaactggggcacaacgtgacggtaatcagcgaatccggcatcaatacttacgctcaggtgcgcgagttaagccacttcgctaacggttttctgattggttcggcgttgatggcccatgacgatttgcacgccgccgtgcgccgggtgttgctgggtgagaataaagtatgtggtctgacgcgtgggcaagatgctaaagcagcttatgacgcgggcgcgatttacggtgggttgattttggttgcgacatcaccgcgttgcgtcaacgttgaacaggcgcaggaagtgatggctgcggcaccgttgcagtatgttggcgtgttccgcaatcacgatattgccgatgtggtggacaaagctaaggtgttatcgctggcggcagtgcaactgcatggtaatgaagatcagctgtatatcgatacgctgcgtgaagctctgccagcacacgttgccatctggaaagcattaagcgtcggtgaaaccctgcccgcccgcgagcttcagcacgttgataaatatgttttagacaacggccagggtggaagcgggcaacgtttcgactggtcactattaaatggtcaatcgcttggcaacgttctgctggcggggggcttaggcgcagataactgcgtggaagcggcacaaaccggctgcgccggacttgattttaattctgctgtagagtcgcaaccgggcatcaaagacgcacgtcttttggcctcggttttccagacgctgcgcgcatattaaggaaaggaacaatgacaacattacttaacccctattttggtgagtttggcggcatgtacgtgccacaaatcctgatgcctgctctgcgccagctggaagaagcttttgtcagcgcgcaaaaagatcctgaatttcaggcccagttcaacgacctactgaaaaactatgccgggcgtccaaccgcactgaccaaatgccagaacattacggctggcacgaacaccacgctgtatctgaagcgcgaagatttgctgcacggcggcgcgcataaaactaaccaggtgctcggtcaggctttactggcgaagcggatgggtaaaaccgaaatcatcgccgaaaccggtgccggtcagcatggcgtggcgtcggcccttgccagcgccctgctcggcctgaaatgccgtatttatatgggtgccaaagacgttgaacgccagtcgcctaacgtttttcgtatgcgcttaatgggtgcggaagtgatcccggtgcatagcggttccgcgacgctgaaagatgcctgtaacgaggcgctgcgcgactggtccggtagttacgaaaccgcgcactatatgctgggcaccgcagctggcccgcatccttatccgaccattgtgcgtgagtttcagcggatgattggcgaagaaaccaaagcgcagattctggaaagagaaggtcgcctgccggatgccgttatcgcctgtgttggcggcggttcgaatgccatcggcatgtttgctgatttcatcaatgaaaccaacgtcggcctgattggtgtggagccaggtggtcacggtatcgaaactggcgagcacggcgcaccgctaaaacatggtcgcgtgggtatctatttcggtatgaaagcgccgatgatgcaaaccgaagacgggcagattgaagaatcttactccatctccgccggattggatttcccgtctgtcggcccacaacacgcgtatcttaacagcactggacgcgctgattacgtgtctattaccgatgatgaagcccttgaagccttcaagacgctgtgcctacacgaagggatcatcccggcgctggaatcctcccacgccctggcccatgcgctgaaaatgatgcgcgaaaacccggaaaaagagcagctactggtggttaacctttccggtcgcggcgataaagacatcttcaccgttcacgatattttgaaagcacgaggggaaatctgatggaacgctacgaatctctgtttgcccagttgaaggagcgcaaagaaggcgcattcgttcctttcgtcacgctcggggatccgggcattgagcagtcattgaaaattatcgatacgctaattgaagccggtgctgacgcgctggagttaggcatccccttctccgacccactggcagatggcccgacgattcaaaacgccactctgcgcgcctttgcggcaggtgtgactccggcacaatgttttgaaatgctggcactgattcgccagaaacacccgaccattcccattggcctgttgatgtatgccaatctggtgtttaacaaaggcattgatgagttttatgcccagtgcgagaaagtcggcgtcgattcggtgctggttgccgatgtgccaattgaagagtccgcgcccttccgccaggccgcgttgcgccataatgtcgcacctatcttcatctgcccgccaaatgccgatgacgacctgctgcgccagatagcctcttacggtcgtggttacacctatttgctgtcacgagcgggcgtgaccggcgcagaaaaccgcgccgcgttacccctcaatcatctggttgcgaagctgaaagagtacaacgctgcacctccattgcaggggtttggtatttccaccccggatcaggtaaaagcagcgattgatgcaggagctgcgggcgcgatttctggttcagccattgttaaaatcatcgagcaacatattaatgagccagagaaaatgctggcggcactgaaagtttttgtacaaccgatgaaagtggcgacgcgcagttaatcccccagccgccagttccgctggcggcattttaactttctttaacgaagccggaaaaatcctaaattcatttaatatttatctttttaccgtttcgcttaccggtgatgctgccaacttactgatttagtgtatgatggtgtttttgaggtgctccagtggcttctgtttctatcagctgtccctcctgttcagctactgacggggtggtgcgtaacggcaaaagcactgccggacatcagcgctatctctgctctcactgccgtaaaacatggcaactgcagttcacttacaccgcttctcaacccggtacgcaccagaaaatcattgatatggccatgaatggcgttggatgccgggcaactgcacgcattatgggcgttggcctcaacacgattttacgtcacttaaaaaactcaggccgcagtcggtaacctcgcgcatacagccgggcagtgacgtcatcgtctgcgcggaaatggacgaacagtggggctatgtcggggctaaatcgcgccagcgctggctgttttacgcgtatgacagtctccggaagacggttgttgcgcacgtattcggtgaacgcactatggcgacgctggggcgtcttatgagcctgctgtcaccctttgacgtggtgatatggatgacggatggctggccgctgtatgaatcccgcctgaagggaaagctgcacgtaatcagcaagcgatatacgcagcgaattgagcggcataacctgaatctgaggcagcacctggcacggctgggacggaagtcgctgtcgttctcaaaatcggtggagctgcatgacaaagtcatcgggcattatctgaacataaaacactatcaataagttggagtcattacccgatatcctgctgagaacataaacacccacggatcgaggcgtacgctatcatgttgctgtgcaccgcccagtttataattggcgatggtatcgatatccatgtaccacactgacatgttttaaaaaatgcaataagacattgtatctgaaagaaaaaacaggattttgaggcgcttttttataccgtttttccgtgtttttaactgcctgattttattgaaatcttttttagttttgcagaaaggattttttgctcgatcgctttaattttatacattcctgataacggaaatttttttgcccgttgacagtttttgttctccggggctatattcctcacacaaccgcaaaatcggttgtcgggattggcgtctcggataacatcacaacgcatagccgcgtttgcggttttttttgcgttaagcattgccacattcgcattatggtggggcgtgcaggggcggagaaatccgcgccgggttttgtgatgaccggttacgccaaccctgtacgtctcaccacctccctgattggcgtcagaggtggtgatcatccaattaattggagtcatcacatatgaatacagctataactttttctaacgagtcaccaaaagtctttttcaaagatggtcgcctggttaccacctctcaagctgttgccgactacttcgataaacaacataaacacgttttagctaagattgacacactcgactgctctcccgaatttacatcagccaacttttcggccgatgttcagactgtcgaaattggcaacggcgcagaacgtgaatcacgatgctacctgatcacaaaagacggcttcatgttcctcgtaatgggatttactggcaaaaaagcagccagactaaaagaagcttacattgaaaaatttaacgcaatggaagaagaactccacaaacgtcctcctgcagcacaaaactcccccgccccaaataatggatgcgcattactgatccacttcgataaacacggtcaggtcgagttcacagaaaaagtccccgccgatgcgatggtatgcactctggaacggtttaaattttatctggagcaacatgggtggatcgttgcccgtaaagaacaattggtggaaaggttgatgcggttttaatgaatgcaaaaccccggatgatcaccgaggttaattttatcgagcgtgattgccgctaatcgccatcgctctgattgagcgtaaatcattcaggttattcagttcttccttctgctctcgctgacgtcaataaatcccatcattgcgatcaacctcatccttaaccattgatgcgagcagttcttccagtttctgcgctgacagctttacctggtgatcttcagcatcttcccgggctattgtggttcgcgcagtggctgattttgctgacatcaccacagggggcagacggaccattgaaccatggcctccggaacaaataagggcaaaaataacaaccactatcgaaagctcacaaactaaccgcagcacgttcctgcatacgacgtgtctgcggcataggtaatgactccaacttattgatagtgttttatgttcagataatgcccgatgactttgtcatgcagctccaccgattttgagaacgacagcgacttccgtcccagccgtgccaggtgctgcctcagattcaggttatgccgctcaattcgctgcgtatatcgcttgctgattacgtgcagctttcccttcaggcgggattcatacagcggccagccatccgtcatccatatcaccacgtcaaagggtgacagcaggctcataagacgccccagcgtcgccatagtgcgttcaccgaatacgtgcgcaacaaccgtcttccggagactgtcatacgcgtaaaacagccagcgctggcgcgatttagccccgacatagccccactgttcgtccatttccgcgcagacgatgacgtcactgcccggctgtatgcgcgaggttaccgactgcggcctgagttttttaagtgacgtaaaatcgtgttgaggccaacgcccataatgcgtgcagttgcccggcatccaacgccattcatggccatatcaatgattttctggtgcgtaccgggttgagaagcggtgtaagtgaactgcagttgccatgttttacggcagtgagagcagagatagcgctgatgtccggcagtgcttttgccgttacgcaccaccccgtcagtagctgaacaggagggacagctgatagaaacagaagccactggagcacctcaaaaacaccatcatacactaaatcagtaagttggcagcatcacctgcggcataatcccaatgattactccctgacaggatttgcaggccactcaatatcaggtgcagttgatgtatcaacacgattcaacaatacccgatatttattccatgcctccagcaacgatctttcttcctccgttgcgatttccagatctacagcatcctgcagtggcgcaatatactcactaaattcctggatgtagaactgtgtggtgacggtcttccagccattcggctcctgctgtatcgaagcatactaggctatttcaatatcgctatgctgcggcagcatttaaccccttgtaattcatcgccataattgatttaattcacaaataaaactataacatggtgaaatcaatgaaaacaaacacagatgatggggctaaaatttacacaccacttaccctaaagctttatgactggtgggttttgggagtatcaaatcggcttgcatggggatgtcctacaaaggaacaccttcttccacactttctggaacatttaggtaacaaccatctggatattggtgttggaactgggttttaccttactcacgtacctgagagtagtctgatatctttaatggatttgaacgaagctagcctgaacgcggcatctacaagggctggggaatcaaaaattaaacataaaattagccatgatgtttttgaaccttatcccgcggcgttacatggtcaatttgattccatttccatgttttaccttcttcactgcctgcctggaaatatatctacaaaaagctgtgtaatacgcaatgcggcgcaggccttaactgacgatggaactctatacggagccacaattcttggcgatggagttgtgcacaatagcttcggtcaaaaactgatgcgcatttacaatcagaaaggcatcttttcaaacacaaaagattccgaagaaggcttaacacatatactctcagagcatttcgagaatgttaaaaccagggttcaaggtactgtagtaatgttttccgcttcagggaaaaaatagcatccaaccgcagcacgttcttgcttaagacgtgctgcggcataatcccaatgattactccctgacagggttcgtaggccactcaatatcaggtgcagttgatgtatcaacacggttcagcaacacccgatactttttctaggcttccaccaccagcacgacaagatgccgcatacagtgacccagtcagtccagttttcagacaaccagtgcgtcacctttttgaaggcgctttaaagcacgttttaatccaggtcggcctgtccttgttccgcttaatttatcttcaaatatttgttcatatcctgcacaaacaagagcgtttcgttgcaggtctgtattctggtcatttgttgatacccttacatagccaatcagcacgctgaatctcccgtccaaaagcacaaatcatgccatgcaggccagaaaccgccattatctaaaacctcggtttacgagaactcggcacaagcggggagaaaataccgttactcagtacagcgaatacctggactaatcgacaaacattcagcggtggcctttctggtgaactatccggcaatgcttctacagctgcaaaattaaaaactgccaggaaaataagcaatgtggcttttgatggttcctccgatatcacattaaaagcaagtcatgttggtgcgtttgccttagggaaaacaggaagcaccgttgcgaatgataaagcagttggatggaactggagtagcggagcctataacgcaactattagtggtgcatcaacgttaattattcatttttatatgggagaaggaagttgtcctgcagctcagtttcggattaattataaaaatggcggtattttttatcgttcagcccgtgatggttatggttttgaagccgactggtccgaattttacaccaccagaaaaccttcagcaggagatgttggtgcactgccgttatctggtggtcaactgaatggtgcactgggtatcggaacatccagtgctcttggcggtaattcgattgtattgggtgataatgacacgggctttaaacaaaaaggcgatggtaatctggatgtttatgctaataacgtccatgttatgcgctttgtctccggaagcattcaaagtaataaaaccataaatattacgggacgtgttaatccctcggattacggtaactttgattcccgctatgtgagagatgtcagacttggcacacgagttgtttagaccatgaagaaaggcgtgatgtatgaaaaatcaggccatgtaatcacggggcttggtattatcggtgaagtcgatggtgatgatccggcagtattcagaccaatacaaaagttaattaacggaacatggtataacgtatcgcaggtataatcatgcagcatttaaaaaacattgtcgcaggtaatccaaaaaccgttgaacaataccagctaacaaagaattttgatgttatctggttatggtccgaagatggaaaaaattggcatgaggaattaaaaaactttcaggaggatacaataaaactggcttacacagttgagggaataattattgctatagacaaggatgtatcagcaattaatccagaaggtttaagtgtcgttgagttgcctgatattacagcaaatcgccgggctgatatttcgggcaactggatgttcaaagatggtgcggtgataaagcgaacttataccgaggaagagcaaaggcaacaagcggaaaatgaaaagcagagcctgctgcagctcgtcagggataaaacccagctgtgggactctcagctacagctgggcatcatttccgatgagaataaacaaaaattaaccgagtggatgctctatgcgcagaaggttgaatccacagacacctccagcctgccagtaacgtttcccgaacaaccagaatgagagaaggcccgctatcgggccttaatttttattcaggcttttgtggccattcaggatttgccgtatccacacggctgaccagaacactgtagcgttcccatgcttccagtcgtgtgcgttcctcgtctgttgccatattcagcctgacagcgcgttccagcggctggatgactgattcagcttcggaaagcaatgcggccttttgtgattcggcctgttgttgcagttcctgttctgtatattccctctttactactttaccatccagaaacatccattttccgttattgtctgcgtgacgatttgccgtaatatcaggaacttcaactatgcttagcccttcaggattaatagttgaaacgtctttactgacagcaacgatgatgttgttctcatcgtaagcaatttttatggtgtctggctgaaaattcttttgttcctcataccagtttttgccatcttcgcaaaagagccataccacgcccgcttttttagttagctggtattgttccggtgttttcggattcccggccttaatatttttcaggtgcatcatcttaaacactccccacgttgtaccatattcccccaatcaatttctgaattggccttctggcaacagtgtcgacaatatcatccgcattgctgttaattgcggctgttaaaacataacctgacgcatcgccaaagccgtagtcgcgccatacgtttttatattcaatgctgccaagacgaatatcccgaacgacatgattatgcagccatgtgcttaaccagttgttttcccacactgaaccataaatatcgccactagacgcaacttgcgcaccacttcccagcgcaaatcccccatctgttttaaaaatgaaatcaccaccaccatctgaaccgttattaatatgaacaccatcaccaccgttatctttccacaaaaacatacgaattcttccgtcttcgttggcgaatgtaatgtggtggcggtaattactttttaatctaaaattgctgccattagattcaatatctttataaagatgtaatcctaactcatcaatatgtccgatgcgcgaaccatttgaatagaagctaataataccatctccatcttgcctaaatccggtgtcgttatctcccagaacaatggagttttcacccagtgcgttatcagtagctccaatagctagacctcctttaattttggccccgtggctgacagatatagcacctgttctcagatttatagcgaatggccttaatgggccgatattaccgttttcgccttgtccttcagccgtcggaatgaaatgaagaaaatcttctgaacgacggaaaattagaccgaaggtatcattgaaaattcgcagcgcattcaccgtgccaattttcagttctccggtcattttatcgccggaacgctgaacggcgttaccagccttgtttaccgtttcctgtaaaccgaggtattcgataacggcagcaacggtcgatttcgcaagaatatcccgcccgacttttgtcagggttgccaggctggcgacatcattccccgtaaaatacggaaacttgcctgccgcagtagtaagtccggccagcgccgtcagggtggcatctttcggttgcttacccgcaagcgcgttagtcatggtggtcgcaaaattcgggtcgttgcccagcgccgcagccagctcgttcagcgtgttcagtgcatcaggtgacgaatctacaagggcggcaatcgcagccataacgaaagccgtgcttgcgatttgggtattattcgttccctgtcgcgcagttggtgttgttggcgttccggtcagtgcaggactatttaagggcgctttcttgttcgtttcacccattaccgccttaaccgcttttggcgttgccgccagtgactcggaagtgctgttggtcgcactgctgagctgtactatcccctttttcgtcgtgctcgcatcctccagcgccacggcggatgcaatatcctctgcccgttttgctgctgtctcggcgcgcgttgccgcggattcagcagcaactttgctctgagatgcagccgtcgcactgcctgccgcctctgatgctttcgttgttgctgtcgtggcactacctttcgctgctgacgcttgtctggtcgcctcatcttttgaagcagacgcagatgatgccgatgacgccgctgaactggctgacgatgcggctgctgccttagaggaagcagcattgtctgctgaagtctttgcatttgtttcagaggtttttgctgcagaagcagacctcgctgctgcagtggcttgctcagtggctttgccagccttcgttgtggctgttgaagcggatgatgcggcgctttctgccgattttccggcggcggtggcactggctgaggcctgcccggcacttgttgacgcggcactggcagataatgcagccgctgtttttgaacctgccgcagctgaggcgctctgtcccgctgctgtttcagaagacttagcgttcgtctcggacgtttttgccgccttcgcggaatttcctgccgccgttgccgaggaagctgcactactggcacttgatgatgcattcgtttctgaagatttcgctgcctcttttgaggccgccgcaccccgtgccgaggtggcagcttctgacgccttcgtggtcgctgtggatgcagaagtggctgccgatttttgtgatgctgcggcattcgtttctgacgttttcgcggcactggcgctggtagctgccgcgctttttgatgactctgcagcagcactttttgctgcttcacgggcctttgtcgatgccgttcctgcgctggaagacgctgactgagccgacgacgcggcctgtccggctgacgtgctggcggcacgtgctgaggctgcagcatcggttgcatgagttgccgcctcgctggctgattttttcgcggctgccgtattctgtgcaaccgcggaggcgttacgtgacacctcttccaccatctgctcaaagcggcgcagtgcctccggtcggacatcatcctccgtcatggcaccgagaaaatcattcagcgtacctggtctggaaccttcatagacggtaatggtcccggcatgtgaaggcggaaaaccttcaaccagcagggtgacgctgtactgaccatgctcaacatccatgctgtaacgtccggcttcatccggattttcagaggccaccgtgttcaccaccatcgtgctgctggttcgtctggccttcagcacaatggtgcagttctgtactggttttcctgtgccatctttaagcacgccagaaatttttactgtcatacttttccaccaataaaaaaagcccgcagcagtgacgccacgggcttcaggacagtgtaactttacgtttcctcaaacgcagttcaccccataaggtggatgaacctgcgtatcataacaatatttacagaagataaatcggcgtctgttgtcagatacggtatccgataccaacaataaatgcatccgttcgccagtcaccactaccggaaccttcataagcaaggtcaatggtcacggattcggtcgggttaaactgcacgccagccccccacgccagagacgtgttgctgtggcgaccgtcatcacttccggtcagcacatcgtgcgttttccccttgttgtcagttacgcggagataatccccggagaaagtcgacacacggctgtaagccacacccaccatcgcatacgcgctgaaccattcattcacgcgtacagacggccccgccatcacgctgaaccagcggttacgcacggaatcttcatgccagcgggtatcgctgtagtgcgttttttgctcatcctcagcattggcataactgaaggacgtaatcagccccagcgcgtccgtaaactcataacggtatttcacgttaatcccgttcagattatcgctgccgggagcgttcgtacgggcatgaagataccccgcgctcagtgtggactgatgttcagacgcccatgcaggcgcaccggatacggacagacagatggctgcggacaaaatggctgcacaaactttacgcataattacctctcgcttttctgcaataaaaaaggcgccatttctggcgcccgtatatgggttataaaattcagctgatactgatgcctgcggtggctttcttcatcaccacaaccagcaaatcgctgatacttgctgtgggataccagttattcaccagccatgctgacaccgaaaactccagcgtcatgtggccgcgaccagctggcatatcaataacaccactgtaaatcagcgtattatccagcgcggtacggttataaatttcagcaccgtttttccgtactatcaggcggcatgacgaataaatatcgttattctcccgctcatgtttagcgccgctgaatgccaccgccggaataacaatttgcctgtcaaaaggctgatcgtcataaatcctgacggtaatggtccctgatggccaccgctccggtgcccgggagtcccgcggaaaagccttacccactgttttgactatatcgccttcaatctggttggctgacagtttccccttaatctgacagttctcattaattgtgacattgttgagcgtcccggcgttcgcattcacactgccactgatatctgcatttttagcggtcagttttccgtccggtgtcagggaaaatgccggaggattaccgccgctggtaatggtgggagccgtcaggcgtttcaggaacacgtcgttcatgaatatctgatcgccctgaccaacaaacatcggctttgtgttgccattcgcaggattaatcatcgcaatcctgtctgccgccagcagcacctgactctgcattcctgctggcgtattctcaataccggcaccgatacccgcaatataaaggcgtccgtccttcatctgttgcagcttcacagcccacatgctgttcagattattatttgtatcaacctgaaccttctgtatctgctggattgccgcactctggtctttcagtttcttattgacagtctgcgtgatttcattgctgacatccgtaatggacgtcctgatttcagccaggtcaggcgcaagctgaccgttatcaatctgcgtccacagctcctgagccagatgtgttttccctatctctcctttgaaaaaatccaagtaaccttccgcatcatcgctcgcccgaccgacagcctccacgaatgccgatttgccaacggtgttcacactgcgaacgtaaaaataataatcatggcccggtttgatattgatactggcggctatccagtacagcgccgtgccaagatagcgggcgctggtttcaacctgcctgatatccgcaatccgcttttccgagaaccagaactcaaactgtaccgtcgggtcataaacggcaagatgcggcgttgcggttatctgaaaatagcccggcgtcagctcaatccgcgacggtgctgccggtgcggcaatccggaaggtggtggtggcaggttcaccctgctggccatagctgtttatcgcccgcaccgtcagggtgtattccccgagcggcaggccgctgaaacggtgctccgtgtctgcggtgatggcggtggtcaccagtctggcatccgttcccttaccactggtcaggcgcagactgaagcgcacacccttcaccacccgcggcgtgtcccatttcgcctgcgccagatactggccgtcaggtgctgcactgccggtgggatgacgctgttcagggaacctgactgcggctcaaagcgggcaccgttatccacgatggcttctttttccagtacgtgctgcaccgccgtgatggcaaaggtgccgtccgtgttttcccggacggagacacagcggaacaggagacggcgcagtgacggcagggagagtccccacaccccgtatgtctccacaccatcaggcagggtactgacctgtatccggtccggcgcggggtgttcggtgatgtccacactcaccggcttaccgctgccgttaatcaggttcaccgtggcggcaccggtctccggaagtgtcacttcacggtccagcgtcagagtgcgggtggcagcatcaatggacaggacacgtccgccggtcagggtcccggcatagtcgttatcacagatttcaatgatgtcaccgggtgtgtgccgcagcccctgagacccgagcgtgaaatccaccgtctgcgtttccagcagttcggtctttatcacccacagtccggcacggtgggcctgaccgcggctggtacagccgaacgcgtccatcttcagcaggttgcgtccgtagcgcagtatggcttccgggtcttccaccagttccgtggaggtctgccagccgttctgcgggtcggtataattcacctccaccgccgtgtgccggtccttcagggcactgaagctgtagcggaaacccacgccgttatcatccaccaccacatcgctgttggtgtacggccacaccacatccgacgggcggtcctgaacaaacgtcagcgtctggccgttccataccggcatacagcgcatcgccgagcagaaatcactgagcacgtcccatgccttacgctgttgtgccaggtacgcattgaaggtcatccgcggctcggtctccccgaaactatccgggaccgtctggtcgcagtactgcccgatggcatacagcgcccacttgtccacatccgccgcccccagacgttttcccatgccgtagcgcgggtgagtcagcatgtcccacagacaccaggccggattgttgctgtatgccggtttcaggctaccgtcccagataccactgtacgtgcgtttttccgggtcatagtttgacggcacctggatgatgcgaccgcggatatggtagttcaccgtcatctgctggccgccgaactgctccgcatccacctgcagccccacaatggccgtgttcgggtagcactgtttcacatcgatgatttcggtgtatgacgaccacagcgtcttattctgcagctggtccgtggtgctgtccgctgtctcccggaccatccggatgttaaaaggacggggaggcagattatccagaatcaccgacgccagaaactgcgaggtggtcttgccgttaatggtgacatccttttctgtcacccagttaccgttacgctgtaactgaatcagcaggcggacggatgtcgggtttcggtcaccctttgacgtggtctgcaccagtgactgcaccccgaaggtaacccgcaggcggtcaatgttcgcggacgtaatggtgcgcgtcaccggttttgccttcgtcacttccacgcccagtccggtttcagcaccggaggactcaaagccttccggtggtgtctgctcctgctccccggcgcgtcagaccgccgtcacaccgtgtatcacgggattaccgtccgtgtccgtcagcggggttttgttcaccaggatactctgcagtcccttcaccggaccttctatcagtccctcaccaatcgcatcaatcacgctcatcatctgcgtggatttgagattatccttcgcctcacgaggcgtgtgtgccttaccgccaccttttcccatacagccttcccctgaataaattaaccgccacttgccattccgtacagaagtcggatatccttcgcccgaaaagcatgaaacacatttctgccatgctaaagagaaaccccggtatcagcagataccggggttttctttcatgcccaccgataatcctgttggttaaaaccggtaatggcataaaaattctgaatatcttcacattttcacaaactgactgtggcgcgtataatttctctgcgttaatttttttgtcgtgatataagaataattccttacacttaatcttcgtaactctcccgcagttcctgtccgcgatcactgcgggatttttttattctttttacccctgccgcccgataaccacgacctttccgcccccgccttcatcacgggtgctgatgtcctgggatatacggcgggagccaaccagcatttccccgtaaggcaccggcatcgggttcccctgggcaatcatgttatccagtgaggaaaagtacgtgttctgtctgccgttatccgttgcgcggtaatccggtgtttttgccttcggggccagcatctgggccacaccgcccagaatcatgctggctccaagtgaaaacagcatcgtggtggcagaaaaaccaccggctgccagggctgaaccccataacgccattgatgccccggcagtgaagaaagagcccacgatggctgccgcccccagcacaatctgcagtccaccctttccggccccggccagtcgcggcacaatgtggatgaccgttccctcacccagctgttcgtgaagacgggcgtacaccgcctccggtgccgtgtcataaccggcaatacgtatctggtaccagccttcgttcatctgacggcgaaagcccggcatctgcatcgacagggcgcgaatggcttccgctgccgtgttcacatacaggctgaggcggcggccaaatcgttgtaaatccccgtgaaggcagatgcgtgccagtggcggtgacgccagactgaatgcgttcgtcgttgccatttttcggaatacctctcccgtttactcagttgttcaggcagatggtgaagcagctcaccgttgccgcagtaaatggcggcatggttcggtaccgaagcaccaaagcagcacagcagaatatcgcccgcctgtgcagaggacaggggcacccggtaaaagccggtgaccgccatattgtccaggtaaaggttctgaccgttgcgccaccagtcatcctcgcgatgaaaatccggcatttcagtccccgccagatgataagcatcccggaacagcgtgtaacagtccgtcaccccgtgctcaaagcgccgtcctgtcagatgtggcacacagcggaatttgtgaatgtcaccccggcagaccaaccaccagggcagtgcgctttttatctgcaaccgccggtcagcctcgctcagccagggcagcccaccgggatgactgtggaccagtgccacaatctccccctgcatctctgcccgcagccagtcttccggtgcgatacgaaaatacgcctccggctctgcggaaatattcacacaagggatataccgctccccctccggcgtgcttatcacgaagccgcacgactccgcaggcgcacaccgccgggcatgtgccagaatcgctgattcagtctgtgtcataaaccgggatttactgcgaaagtttattaatggaaaggaaaccgccaaaattgccgacattcctgcgcagttcacacccgcgcatgcacttgctgcatctgtccttacggatatccgtggtggggttgtcgaactcatccgccaccgcaggaccgttatacccgcattcatctccccggtaatcccacatacaggtgttcgccagcatgatgcgaccgggaaacagcgccccgtccgtctcggtcggtgtagccagcacaaacgaggccgtcatggctgtcagctgcgacatctgctccaccacccagcggtcactcagctcctgctccgggtccgcctccggattgcccgcaacgaaattcaccgcatccagaaaacgggcatacacccggcggcggaccaccgtggcccccaccagactctgcaggtcttccgccatcccggtgaccagaccgaacagattggacaccgtcagcgacggtctggcactgctgccccggccgttcatctcaaagccgctgccgtcaatcgggtatgcctcatacttacgcccctgccaggtgaccggctcccctttttcattcagctcattacagaaaaaataccgctcaccaccctgtaccgtcaggtcgatttcccagagtaccacccgcggtgactgctctgacttaaccgactcgttcagactttcttcgcgaatatcctgcatcagttcaccacctgcttaaactccgcgctgaactcaacgcgcaacatcccgacccgcgcagaccacccggcacaggtcacctttatctgccggtatgcatagggtggcttccacaaaaatgccttccagccaccgtgctctgccaggaacgcttccagatgccgggcctcctcccgggtcacggaaagcgtcaccctgtatgttttcaggtcagcattcagccctgccgccatacgctgtgagtacccgtcaccaaaacgcacttcacgcaccgatggctgcgagttcacctccatatccggcttcactttccagcgaaaggttttcatccaccgctccctgataacataccgccatcacgcaactgcagccggagttcatcctgtgcccccttgcgggccatctcatacaccgctttcatcagctgcggccctgcccgcccgttggggccgtcgttctgaatcaccacgtgattgttctgattaaaattaatgccttccgcccgccgcatctgcgccggacttccggcaccgccgacataaccaccttccgcatagccccgcatcaggcggtacagattgccgacaccaatccggctggtcgcctccttcgtgaagacaaactccccgcgatgaacaatccccgcaggttcatatttaccccccgtccccgtaaatcccccggtcgcgaaatggaagttcgccgccgcagcctgaatggccgtccccgtggaggcagacgcaccaccaccgaaagcaccgccaatggcgctgccgatactcccgactatccccaccatcgcctgcttcagaaaaatctctgtcagcatggacagcacagaacgggtgaaaccacgccagttctgttcgctgccgatcagcatcgctgccatattctgtgcaataccgtcaaaggtctgcgtggccgcgtttttaacctgcgaaaaactgtccgtcgcactttccgcccactcgccccagccggacttcatcccggccatccagcttccacgaagctgctcctccgcagaccaggtgttcttcagtgcagatgtggccttcgccagcgcagccggattatcaccgtacacctcacgaaggcgctgctcttccgactcccgctgcgcctgacggtcggtgagtccgcgggcttttgcgctgattgccgcctgcttcgcgctctgctgctgttcaaaccgcgccgcctgctgtgccagctcattcagccgtttctggtgttcaatcttgtcgcccagctcagccagctggcgtttgtactccagcgtttctttctcatgggccagcagggatttttcctgctcagataactgccgtttcgtggcggcctctttcaggaccacatactgattttccgctttccataaatcacggcgctgctggctgattttttcattcgcaccgctgtgcttctccagcgtcctgagctcagtttcaagcgccagcagggctgcatgcgcctggtcttcctggcgctcaccggcagacaccttcacaccggacggctttttctgcgtcgactcataatccttttttgccgacgccatcagcgtgttgtaatccgcctgcaggattttcccgtctttcagggccttattcagctcttcctgccgggcggtatatttctccagtggcgtcagcaggcgctcatacgccttctgcgcctctccggtatacttcagctgtgacgactcacgctcagccctgtcccttgccgccagttcaccggctttttccatatccgactgcagcgttgccgctgccagacccagacgggcattttcccggtcatcccatgcgccctgaaggttggcccggaaagaggaggttttaccgcggcgctggctccgactctggtaccactgccattttttatccgcctcatcaaatgccttctgcgcactggcgagcatatccgctgaggattccggacgaccgatatccagaatggcatcccacatcgatttgaatgccttccctgttttatccgcccaggtctccagtgttcccatgttttctttcaggcgacgggtctgctcatcaaagcctttcgtggcgatatcgttcgccgcctgcaatgccccggcctcgtctccggaacgctgcagctgtgcaacatacgcaatctgctctgccgtcacgttacggaactggcgcgccatcgccatcagtcccgacgtcgggtcagtggtcagcttcccgaaggcttcagcgactttatccacctccacaccggatgcagacgcaaaacgcgcgacactctggttgatggcatcaaactgttcaccaccacgcacaccggcattcaccagggctgccagtgactctctcgcctggttaaacgtcagccctgctgcctgcccggctcttgagagagtcagcatacgatcggcagtcagtccggactgattaccggaaagaaccagggttttattaaacgctgaaagcgtggaatctccctggtaccaggcgtacaccagtgcacctgtcgccaccgccagcgaggtgaccccgaccatcggcagggtgatcgcatcggcaagccccctgaacatggggatcatcccgccgaaggagtccttcacctgaccgccctgttgcagcaggatcagccagggattctgaccaccggcaagctgcgtggcgatatccgtaaactgtgcgggcagggttcgcatggccgctttatactgcccgacggaaatcccggctttttgtgcagccagcgcctggcggctcaggccctgttcaacagcactggcggtttttctggcgtcggtatccagacctgaaaaatgacgccttacccggctcatctgctcatcgaaacggacagcatccagactcaggtcaataacaagatcaccaaccggctgggacatatctcacacctcccggaatccccgctgaagccatcattaatgcggcatcatccaccatgacatccgccacatccgcagacgataaaatatcgcgccctccgtccccaccgaaccggacgcctccggcaagtcctgccgctttctgcatcagcattttgtcctcatccggcctctccacctgctcttcctcatgccgggggacaagcagactgaaatcagagggatgcatatccggatcgcaaaaaaacaggctgagtacagcgtacgtcagcccggaaaaatgcatatccagctgggtatcctgaaaataatgcgtgcggtaaaaacggcgccagtcggcatattcggtggatgtcatcccggcaagcatggcgcgccagtcgggtctccccatctcacgcgccagtctgagggcaaagttcagctcgccgtcgaagactttcccgcagaaaaatcatcatcagtcagcgtgttatttttcgccacttcagtaatatcagtatccggacgaacagcttcgatcatcccggacaggcacaacaccacgtcttccgcccgggcaatggcatcggcaggccaggtggtgagcacttcctgctctatcttcatcacggcctcattcattgacggtgactgcgttttctgtggatggttatgccacagggacatcgccaccagaaacgcgccggttctgacgagatcttccacgcttacctgcaggttgccgctggattctgcctgttctgcacgccgtttcaggagggcaagatgctcgatacgctgcagcgcagacaattcggaaagcgtgacagacacaccgttatattcaaattgttctgttttcagaaacatgtattacctccgtttaccctgcagcgcccgcttcagtaacggtgacttcagccactgcggcgaactgaccatttccgctcaccacagggatctgcaccttacctgtcgccacgccgtttaccgtaattgtcatatctttcacactaatggtggctttcgacggatcggcggaaaccgctctgaacgtcttgtcggttgcactttccggctcaaaagaaaccgtcagggtggttgttttcccttttgccaccgtaccggatgtcggcgtcaccttaatcgcactgaccggcgtaattttgctgcgttcttccgctacagaaggtttacccacgttagtgactttcaccgtgcgggtgatcacttctttcgccgtcacggccttaccgatactgctgacccagccacgaaacacatccaccgtgccattcggaaaacggattttataggcccggacatcgccgctttcaaaccagcctataagccctttctggccttcctctcccggtttccaggccagcgtaaaactggtatcacctgcagatttctgcccctgcccggtcgcgctccagtccgcgtcttcatcatccaggtagttatcatcataggattcagccgtcatctcgcccggcgtcagatccttcaccttagccagtcgctgccagtcatcgtctgacaacgggtttgcataagcatcagccttgccgttgtaaacccacagagtggtaccggcaccttttaccggctccaggggatttggtgttgccatatcgtcctcacatctcgtatgtaatggaataagtcagatccgcagagctccataacgccatatcgtcatcacgacgatactcatagccctgcgtaaccatcgtggtaatcagtcctgccagtgcagggatcgcagtcatcgccggataaatccggctttccatccactgatcgagctccgaatcaggtacctgtgccggtaaaaacacctcaatatgcagtgtggcccgccaggtatctgcatccagctcttcaccggtatactctgcatccgtcagataaaccgcgatcgcaggaaaatcctcttcgtcaaaaacaacggggcgaccatcaaacagcgtcgccccgtgttcatgctgctcgagtgcatccagcactgcggcacgaatgtcagtgtgtttcatcgttttatcgcaatcctcagttgttgtttcagcgcgtatgccagttctttaggcaggcgttcacgccggatacggtcaacattctcatcaaatgcctgtttcagtggggccgccatcgggattttcaccacctgaatgggaaggcgattacgctttttccttcccttgtcgtcattgccctcctcatatctggcctggggaagacgttgcataacatgccagcgcccattatttaatcgctggataaatgcccgctgataacgatgctgaccggctttgagtatgctgttcggacgacgccccagcattctgatccccagcttaatcacagggagatcaccgcggttaacgataattctggcattcggatttctgaccgtcgcccgtttcagtctggaccgttcctttaccagtttccgtctcaccctggtttcccgggcaacctgtgacgaagactgattaatcgccgttgtggccacgcggttaatggtcattgcagaagcagccggaatggcgtttttacgaacccggttcagattgtcaatcgcctgatcaagcccttttatcgccataattcaccctgcgtttatcgtcgccggttaactgcgggtggttgcccacggttgagccagagataacagctgcccccgtcatccggagatgtcagcgccagtgatataagacggtaattcgccatttggattgtccgctccacccaacatgttgtttccttaaggttctcacaccagaaaggacatcaacatgctgagcagagaggacttttacatgataaagcaaatgcgccagcagggcgcgtacatcgtcgatattgcgactcagattggttgctctgaacggacggtcagacgctacctcaaataccctgaaccgccagccagaaagacccgccacaaaatggttaagctgaaaccgtttatggattacatcgacatgcgcctggcagagaatgtctggaatagcgaggttatcttcgcggagattaaggcaatgtgttatacgggcggacgttccatgctgcgttactacatccagcccaaacgtaaaatgcgtccgtcaaaaagaacagttcgcttcgaaactcagcctggataccagctccagcatgactggggcgaagttgaggtggaggttgccgggcaacggtgcaaagttaactttgcggttaatacgctggggttctcccgcagcttccatgtcttcgccgcaccaaaacaggatgctgagcatacctacgaatcactggttcgcgccttccgctacttcggtggttgtgtgaaaacggtgctggttgataaccagaaggctgcggtgctgaagaataacaacgggaaagtcgtgttcaactccggattcctgttgctggctgaccactataacttcctgccacgggcatgccgtccacgcagggccagaacaaaaggtaaggttgagcggatggtgaaatacctcaaggagaacttcttcgtccggtaccgcaggttcgacagcttcactcatgtcaatcaacaactggagcaatggatagccgatgtggctgacaaacgggagcttcgccagttcaaagaaacgccggaacagcgcttcgcgctggagcaggaacatctgcagccgttaccggatacagacttcgataccagttacttcgatatccgccatgtgtcctgggacagctatatcgaggttggtggtaatcgttacagcgttcccgaagcgctgtgtggtcagccggtatcgatacgaatatcgctggatgacgagttgcggatctacagtaatgagaaactggtggcctcacatcgcctctgttcagcatcgtctggctggcagacagtgccggagcatcacgccccgctctggcagcaggtcagtcaggtggaacatcgaccactgagtgcctatgaggagctgttgtgatgcatgaactggaagtcctgctgagtcgcctgaaaatggagcatctgagttatcacgttgaaagcctgctggaacaggcagctaaaaaagagctgaactaccgggagttcctgtgcatggcgctacagcaggaatggaacggcaggcatcagcgcggtatggagtccaggctgaagcaggctcgtctgccgtgggtcaaaacgctggagcagttcgactttaccttccagccgggcatcgaccgtaaggttgtccgggaactggctggtctggcgttcgtggagcgcagcgaaaacgtgatcctgctgggccctcctggtgtcggaaaaactcatctggccatagctcttggcgtgaaagcggtggatgcgggacatcgggtactgtttatgccactggacagactgatcgcgacactgatgaaagcgaaacaggaaaaccggctggagcgtcagctacagcaactgagttatgcccgggtgttgatcctggatgaaataggctatctgccgatgaacagagaggaagccagtctgttcttccggctgaggtagcctgagtttaacggacactccttcctgaaatagaatggcatcagaaggagctaataatgagcagaaaaacccaacgttactctaaagagttcaaagccgaagctgtcagaacggttcttgaaaatcaactttcgatcagtgaaggcgcttcccgattatctcttcctgaaggcactttaggacaatgggttaccgccgccagaaaagggctcggtactcctggttcccgcacggtggctgaactggaatctgaaattctgcaactgcgtaaggcgttaaatgaagctcgccttgagcgagatatattaaaaaaagcaacagcgtattttgcacaggagtcgctgaaaaatacgcgttaatcgaacaatggcgacaacaatttcccattgaagcgatgtgtcaggtatttggtgtatccaggagcggttattacaactgggtacagcatgaaccctcagacagaaaacaaagtgatgagcggctaaaactggagattaaggtggcacatatccgcactcgcgaaacatatggaacccggcggctccagacggagctggcagagaatggcatcatcgttggtcgtgaccgactggcacgtcttcgtaaggagctaaggctacgctgtaagcagaaacgcaagttcagagcgactacgaactcgaaccacaatctgccagttgcgccaaatctgctgaaccagacgttcgctcctacagcaccaaatcaggtctgggtggcggacctgacgtatgttgccacacaggagggatggttgtacctcgctggcatcaaagatgtttatacgtgcgaaattgtcggctacgccatgggagagcgcatgacaaaagagctgacaggtaaagccctgtttatggcgctcaggagccagcgcccacctgccgggctaatccaccactctgatcgaggttcacagtactgcgcatacgattaccgggtcatacaggagcagtctggtctgaaaacatcaatgtcgcgtaaaggtaactgttacgacaacgctccgatggaaagcttctggggaacgctgaaaaatgagagcctgagccactatcgttttaataaccgggatgaagccatctcagtaatacgggaatacattgagattttctacaatcgtcagcgtcgtcactctcgtctggggaatatctccccggcagccttcagggaaaaatatcatcagatggctgcttaaaaaaagaacaaatggtagtgtccgctattgccagtacacctcagttagtcagcttcttatcgaacttgagctgaaggatcttaaaacaagtttccatagtgctcctggattttctctttttggacattgacgtctccactggtttaaacacggcaatggagactgtggtgaaaagagttaattcccggagtgactggcgaattccaatcaatgatcggaagtatgccaaatcgtgatcgattgtgatgccaaactgtgatcggagatggatgccaaatcatgatcgattcgaatgccaaactgcgatcgattcagatgccattttgcaatcagcgccagaacagcagctgacaggccgtatttgatttttgcgctcatggatatttatcaggatgctaccaatgaaagatactggaaagccaactgcaaaaagctaacaacccgtaatcgagttatcagaactgttaatttttatggtataccgcgcctctgaacaggggcgcgtttctggcaacagctcgtccccttcacataacccggcagcaacatccaagaagacctgtctgatgctccttctggctgctgcctcataaaactccagcgcggcaccttcaacacggtccagcgagatgtccaggtcaaaaatttcaccgtcaaagcgttttttgtcccgtaacgctaaagttaccgtaactttattctcaaaattgcggatccctttcacaatcagttcatagttttgagtcattgaattactctccccgtgcagccttacgacggtcctctctgattttgaaatacaggttagtcagatatgtcagcagcccaaacagcagactccccagcacgcctattgccgcccactgagacggggaaaccctgtccagcaactgcaggaaccagtagcccgttcccaccgctgacgtggtgtatgacacacctgttgtgattttttccatctggtacataccccgtctcccgttatccggaagctgacaacaataaaaaaagccaccagttaagtactgatggctctgataactcatgcaggcatctcagacgacccactgacactaccggtgagtttaacgataccttccatttggctggctcactttttatgatgatgccggtgcatttatctccagcaccagactttctatctcaacgccatacgctgcatttttggtaatatccgtcagcgtcagcgcattcagccccagtgtcagactgtcttttatgacctggaatgccgggccagccactccattcagtttcggagtaaccgtggcactgccggcggtgaacaccagctccagcgtcagccagtcgttactgtaattcccgaactcgcccaactttgtgtttcctgctttcttgtgatgcatcagattcagtttgccgtctgtggtctgggtgaagaacgacatcaggaacgggttaccagtcccggtcatcgccacgacgtcaggtaacgctacatcggtatacagataaattcccagaccgaactggttgttggtcagtgcgcctgacagtcgaaacttacagctcagtctgccaccccgtgtcagcagggagactgcgtcatccaccgggcgcgtcagggaccaggctttattgctctgcttggtgatcttaaatacaccatctgacaactgaactccgccattcttaatgctccagccctgcgcagcagcgtctccggctgtcggcaacagggagattgtgcgtatggatgcatcttcagacggccccgatggcgtgtcgccgccgggcgagggtttgatttccggtgccttaccactaatgaaggctaaggtgcgaccggctacgttcagaatagcagttgccatacgatcgggaataatgccacgacgcgcccatgagctgaaatgcgtcgggcgatttgatgatacccagtttttgttcgttcgggatgccgaaccgtaataaccagacccggcaatatcaggatcttctgacgggttgtttgtcggtgtattaactccgctaccatcggtcataaagggaacaaaataaatctgctgggattctttacctttatatgcaccatataccacttcatattgcgtaccgtgttcttgtttccacgcgtatgtcgtgtcgccacaaatccaggggactgatgccggacttccaccgtgacactgcgccgccagcccggcaaggtcagcacggaactgctgtaccattgcaagaaatgctgctggctgctgggcgtaactggcattcgtcatatcgaattccccctgcatccagcatatcgccagcaaaacgtttttcgggtttttctgcaatgctgccttcgtgcggaaaagcagatcctgatataacggcttacccactccccagcgagccgaatcctgactggcccccgtggactcgctgaatgtcccctccgtgccctgggtgaatgccgaaccaccacaacagcatggtaccagcaggatccccgcattattagggatatacggaagcagttttttggcaatatgtaagccctgtccgacacagccgtactgccctttgctcaggtcagcccggggatggttaatcgtactcatatcctgaacatcatgcagacaatggtcagcaggaatgatgtcgttaaatacgcatacttcaccaccgggagtcactgtgttacgacgggccagttgcttaatgcgcggatggggcgcatcgtatgaatccggaagcggaagaccttcaccgtaagccatggcattggattgcccggccagtacgatgacgtagtaccactccggctcagttgcaccactgacgaccacatcaccttctgctgcaatcgcctgcatcagggtataaggggttatggccaccggactaccaaacggctgccagccctccttcagtttttgtgtcagtcgtttcgcaaggtctgacggcgatgccgccctgaccacgtcatagtgtttaaatgccatgaatcctcccggccgggataatattgtgagtaaaataaggagcgggctgaagtccggaagttacaggacaatggcagaagagagacgacagcccgcaattcgaaaaagaccgcgcagttgcgcagagtgattactatggggtattattcgccagctgaaatattacttcacgttttattgtttattccttgccgcccgcgtctcccagcgcgggctttttttgcccacaagaaaacccctccggagaggggctaaagccgcgtatctgtatcatcatgcacatggtgccgggtgcctcccggtgagttcagcccggtgccactaaacccgcgtcattctcgttttgataatcagagattataccgtcaccagtcgcccctccgctcagggggattcaccatgcgaaatttttttaacaaatgcccagtctgacaggcaactgtcaacttactgaattgtgagcaacatagcatttaacggggaacctgttttctgcagtaaaaaggcccaccggagcggatgggcctggaaggatagcggtcatgtgatgccggtttcccggtaactcagcaccggtatctgagtcaacgttttctctactgggtcatttccgatacgccctgcctgctgacaggctttcatcacatctgaaaatatagcaccctgactgatactgtagtacctaaggttccagaaactgtgatgtatccggcacagaaaagcccctccggagagggctggagagtggcgctatgtgccattgcatgatgccgggtgcctcccggtgaattcagtaccagcacctgaatccgcgattatcccatatacctactcgctgattgcccctccgcacagggggattcaccatgccagtttcttttaacaaactccccgcaaaacagacaactgtcaaccgtctgaattgtgagacatttaaaaaaaaggcccgcaaaagcgagccagggaaaataagtgtggcgcgttgtactggattcgaaccagtgaccgattgcttagaaggcaattgctctgtccggctgagctaacaacgcatgatgcagataatggaccgccatcggggacttgaaccccgcgcagccagcttcgaaggctggcgctctttcctgatgagctaatggcggtatgtgatggtggcccttgctggatttgaaccagcgacctggcgattatgagtcgctcgctctcaccactgagctaaagggccgggagccgcataataacgacgcgtaattaattcttcaatatcatccgttctggctgactaaatcctgtacttcccgaaccgtctgctcaaaacgttcagtctccagctcaacgccaattgcacgacgcccgagcgccagtgccgctttcactgtcgaacccaaccccatgaaaaaatctgcaatcaggtcacccggacgactgctagcgctgattatctgctgcagcatttctgccggtttttcgcacggatgtttcccgggatagaactgcaccggtttatgcgtccacacatcggtatacggcacctgcaccgtcacgccaaaataccgccgcagatgtttatattcactcagcagctccgcatactgccggttcagtgaggtatacgtatccaccagctggtggtggagcttttccagttcaccacgccgatgcttctcttctgccacccgggcaaacagcgcctgtaatttcagataatcgctttcattcggcaactgccactgaccggcactgaaccagtgcgacaccatgtttttctttcctgtggcatctgcaatctgttttgccgttatccccagggcagctcgcgcatcacgaaagtaagaaatcagcggggccatcacatgctgtttcagtgcactgcccttcgccgcatacccggcatctttcggacgatacggcccctgataatgttccgcgaacagaatgcgctctgtggcggggaaatacgcccgcaggctttccttgttgcatccgttccagcgtccggacggcttcgcccagataatatggttcagcacactgaagcgttcacgcatcatgatttcgatatcagatgccaggcgatgaccacagaacaggtaaagacttccggcaggtttcagcacccgccagaactgcgccagacactggtccagccacttcaggtaatcatcgtcgcccttccactggttatcccagccctcaggcttcactttaaagtacggcgggtccgtgactatcaggtcaacagaattttcgggtaacgaccggataaattccaggcagtcggcgttgattaactcacaactggatatttttacagtattaagcatggatcattaagcctgtctctgataggctcattctgcttttgcgcaaagcagtgggcctgaggtttgcttgtgaacccaacgcatgagcagatggctggtgggtgcccctaacacccaccagccgcccatttaccacaaataaaaaagccttcactgcggaaggcgtctgtaacaaccgaactgatagtctgccagacccgccataaccagctgggtcagtattaactggcagcgttcgcgtgaaaggtaagtattctgcgctatctccccgactgtcgccggttcggtaacgcttaattcattaaacaccactctggcggtttctgtcatatcctgctgttttagcatgtcttttccttttccggttaacgtgacacaccaataactcttgtcgaaaaagccagcaagctgaaagacaggtattcaccgccaccagcgcgtttactgtactgacgcgatttcagtcataaaaaacccgctcggcggcgggttgtagaaactcttctaacgtcaggcataaaacgcccatcgttatgacgaatttaccacagattccggaaaaatcaaccttgttacctagttaccttttttaactgccgctcagcccatgcttcttcaatatcaaaccgggtcaccagcgcatcataaaatttcttaactgttttttcccatgacgcgcgtgttatctggtttgtcacctcgcatatagcattaaatgcctccgttgatggtagtctttcatagccacgaccaccacaacgctggcagtctctgataacaggcataccacgttttaccgactcttcacgatgaatggcgacaccacgcccacggcaatccttacaggcggtggaaacctcaccctttccgccacactccggacaggcaacttttaccacctccctgacttttttccattcttcccagtaagacggatacacacctttcgtacactttgcccataccggcggcttaccatccggatactggatcttgtttgtaaaaacctcgctttcaataaatttttttccgtgacagcaggggcactgttttttgctcgccgcgctacgggcataatcttcaaacgcatacgaagccataatacgcatcactgccggttttatttctgccgggagttttcttaacgccgccacgcgatcacaccgactgagtgcatattctgtcagcaattctgttgcccgctctctgtcattcatactaatgcccattttcccaaggaacgcagaaacccccatctcagcccgattctgtgtcatgccctgcgcggccatcacatcagtgatactcagcgcatctttcgacgttgaggccgatgcatcagtcaggccgggggattttggggagtagtatttcggtaaatcttccagtttcattttttgacctgcccttcaagcattatgggataaatcttcacccccagacgtccaccagatactggctgagcacgaacgatattgatttcatcaaactgctcatcgtccattagcaaccccgcatgcgtcagcgcatccagcggcgctttcagaatattgtccaggtcacggcggcgcttatccggtggttctgcaataatttttattgccaaccttccggacaggcttaatttcagccgctgctggcgaacaataagcgccactgcccggcgataacgctccccggcttttgatacaaaatatgtgctgccacgacgacgccagtaagtgttcaccgtcggcgggtaaggtaaaacaaattctatgcgctcggtcatttatgctttccacttcagaacacccgaatttctcgcgtgcattaaaaaacgaatcagcaacaacagctgactgccgtgtttctcttcaaaatcttttactccggcatgtagttcgttacggcatttacggcataacggaataacaaacaaatcatcagcctttgttcccatccctcccagtccatgaccaatgatgtgatgcggatcatctgcctgattgccacacgtcatgcatttctgcgtttttacccagcgcgtgtatacaggcatctcttcccgttgtgatttctggcgctggagatactgagccggtgactccggatcaacggcaatgctgaccaccgtcttttcctgtggtgggttctgttgctggtggacgtgaggcagtaacgcaatattttttgtgcgctgcttcagtatgctggtggctgtctactctcccggtatgatgtcgctttcactgtacacagagcgaattttttccgcacgcaaccccagcgaacgacgtaataccgcttccggtagcgcgtccgccacctgattgcggaccgcccaccaggataattcagccagagataattcacgctcctgcgtaccgcttattgcgtgaccgatgacgtcaatcatccatgctgacaggttttgatgagcaagttgctcgagtgattcggatgtctggtcacgcagctggttgtcgcagtgccagcacaacaccattgcgccggtaccataacggtgaatgacggtttcgctgtgatgataatcgccgtgtggccactggcaggatttaatatggcgcaacagccagtcagacaatgcaccagcaccaccagcagcacgaatcacccgtgcgttactgaaaaacggcagcaatgttttgtcttccaccagcggctggcgagcggcaggaacgaccccggacggcagattacgcatgctttttggttccggctccaccagtattctgccgttatggaatgctgacattgattcacggcctggcttaacgataaccagaccgagttccggtaccagaacaggtcgaagtaatacccgcacattacctccagatccgttgctggaatgtgcgggacggacgcgttggccgttcggagtaagggagcctgacggagattatccagtgacggtagtcgaggctaagggcttttttaacctcgcatccgcgcctgcggtaacactgaatgagccattcggcctgttcttcagtgcatgggggatgctggtaccaatcagatttaaatgcgtgagagcgccgcccgtgcctgctggcaaagacggctgaattatcagaattgtgtagtctggaattttgcgccatcggctttctccggtggcacagtgttactcaacaggggttcagccctgcgctgaattgtagatgaattcactcatcttcaaaagcagaaaaaccagccttaatcccagcttctttcagagacggcaacgatgtgacaaattcatttgcacgcgaaataaaaccatccgtcacaagcccatccacaaaatgaattaacgcagctccactcttcctttgttgagactgtaaacatttaatacggcagtggctgacaatagcgccattctcaacgcgcacagtatagaggccatcttcactaaaaatttcacgtaattcttcgattttcatcaacagaatccttccagataaatagcactcccctgttcggggtccatccctcttctccctgcgcgctacttaagtatttttgattctattccggcaccatctaaaacttcaaacgcgttgaaaataaaaacaaaaacccgccgaagcgggttaagtgtgggtgcattgaggatgcctgacccatcagaggtggcgagggatttctcccccgcctggtctcttactcctcaggttcgtaagctgtgaagacagcgacctccgtctggccggttcgaattcgtacctcgcagaggtctttcctcgttaccagtgccgtcactatgacggttaaacagatgacgatcagggcgattaacatcgccttttgctgcttcatagcctgcttctccttgcctttcggcacgtaagaggctaacctagatttgccgttcatagattgagcctcagattaatgttaagcgtcttgccggacgcgtaatgttaactggggcttttctctatctgccttttggtgttcatgcctgagacagatagcctcaagcacccgctgcaattctacttaactctccttttcccgcaaaccgtttttatccccagcggcaaatcgaatacaccaccagcgccaccgccatcgcaattcctaccgttgttaatgcttcaggccaggtcatcgtaaaatatcctccacgcttatcagtccgttccgctccagataactcatcgccttatccggtaatttgcagtctggcttcgcttttctcagttgccaggttaactgctttaccagcatggttaactcatcgaccagacgctgatatcccactggtttgtattcatgcaatttaccggctggctctgctgccagcgataccagtgcgatttccagaacagcaatatccatcttatatgtgcggatgatgtcatggtcgattgtgcccggtatgcacagtctctgtgcttcaatagtctcctctgcgtgagctattaactgctctctggtaaaagtcgtcatgccgtagccccttcttgatatttttcaaaccagaacacaaccggctctgcttccagcgatgccagcgcaatccgtgccagttccatttgttcaccacgggtaagcccgttttcaagcgggtttttaatgaacaattcaatacgttctttggtaatagtggtcatgtgttactccttaacccgcagtgctttcaactgatgaggggaacaaaatcttttcatcaaaccctgcattcatatcatgaacagcaacacaccaatccatcgacgaacgattatcaagagcctccatgatttcatccatgcggcgtaggtcatacaggtaaatgcttttatcgccaatggtgtaaaagccaatttttttcggtgatggatgaggtgtactggcaatagcggacactaccatttgttctttttttaagcagccatctgatgatatttttccctgaaggctgccggggagatattccccagacgagagtgacgacgctgacgattgtagaaaatctcaatgtattcccgtattactgagatggcttcatcccggttattaaaacgatagtggctcaggctctcatttttcagcgttccccagaagctttccatcggagcgttgtcgtaacagttacctttacgcgacattgatgttttcagaccagactgctcctgtatgacccggtaatcgtatgcgcagtactgtgaacctcgatcagagtggtggattagcccggcaggtgggcgctggctcctgagcgccataaacagggctttacctgtcagctcttttgtcatgcgctctcccatggcgtagccgacaatttcgcacgtataaacatctttgatgccagcgaggtacaaccatccctcctgtgtggcaacatacgtcaggtccgccacccagacctgatttggtgctgtaggagcgaacgtctggttcagcagatttggcgcaactggcagattgtggttcgagttcgtagtcgctctgaacttgcgtttctgcttacagtgtagccttagctccttacgaagacgtgccagtcggtcacgaccaacgatgatgccattctctgccagctccgtctggagccgccgggttccatatgtttcgcgagtgcggatatgtgccaccttaatctccagttttagccgctcatcactttgttttctgtctgagggttcatgctgtacccagttgtaataaccgctcctggatacaccaaatacctgacacatcgcttcaatgggaaattgttgtcgccattgttcgattaacgcgtatttttcagcgactcctgtgcaaaatacgctgttgctttttttaatatatctcgctcaaggcgagcttcatttaacgccttacgcagttgcagaatttcagattccagttcagccaccgtgcgggaaccaggagtaccgagcccttttctggcggcggtaacccattgtcctaaagtgccttcaggaagagataatcgggaagcgccttcactgatcgaaagttgattttcaggaaccgttctgacagcttcggctttgaactctttagagtaacgttgggtttttctgctcattattagctccttctgatgccattctatttcaggaaggagtgtccgttaaactcaggctacctcaaaaattaaagggcaggttgttgaacttgtacgtctgagcggtcgcgagacgttgcggcaactggaagccaagacaggtgcgacaagatatctgatgagtgttctcgccagagagctggttgccagtggcgatgtatacaactctggttacgggttattcccgtctgaacaggcgcgtaaggactggcaaaacgcccgcaaaaaactctcaagggcaaatctgaagaaaccatctgtggttgatcctgaccttatctggtcattaccagacggagaaatacgccgctacgacaggcgtcaaaacataatctgtagcgagtgccggaagagcgaagctatgcagcgtgtactggctttctatcagggtaattttcagaaggtgctgttgtgagccaaattaacaatcggaacttcgtgaagagaaagcataatccaaaatctgaataattaagttcagcactgtggtgatgctgccaacttactgatttagtgtatgatggtgtttttgaggtgctccagtggcttctgtttctatcagctgtccctcctgttcagctactgacggggtggtgcgtaacagcaaaagcactgccggacatcagcgctatctctgctctcactgccgtaaaacatggcaactgcagttcacttacaccgcttctcaacccggtacgcaccagaaaatcattgatatggccatgaatggcgttggatgccgggcaactgcacgcattatgggcgttggcctcaacacgattttacgtcacttaaaaaactcaggccgcagtcggtaacctcgcgcatacagccgggcagtgacgtcatcgtctgcgcggaaatggacgaacagtggggctatgtcggggctaaatcgcgccagcgctggctgttttacgcgtatgacagtctccggaagacggttgttgcgcacgtattcggtgaacgcactatggcgacgctggggcgtcttatgagcctgctgtcaccctttgacgtggtgatatggatgacggatggctggccgctgtatgaatcccgcctgaagggaaagctgcacgtaatcagcaagcgatatacgcagcgaattgagcggcataacctgaatctgaggcagcacctggcacggctgggacggaagtcgctgtcgttctcaaaatcggtggagctgcatgacaaagtcatcgggcattatctgaacataaaacactatcaataagttggagtcattacccggcactgtaaataaaatttaatccttaactggaggtatatctatgtcaaatacacagaaaattattaacactgaaaaatataacgagtgggtgaaaaaattctctgagcagatttttaaaattactggcgacgagaatgtggcaaaaaatgaattagaaccgtggacacctgaaggaaacgcaccaaattattgctggtgggaggttgatccggttgatgctgcaaatgaagccatgagttaccacaacgattaatgtcgggaggccgcccgaaagggcggtaagaaatgactacattattcagaaaagaatatccgcaaaaaagtagggcgacagaatttttgtttctcattctgtttatcgtattgatgataccgatatcccctctaatttttgtctgggcaatcgggaaaataattgtgaggtagcctgagtttaacggacactccttcctgaaatagaatggcatcagaaggagctaataatgagcagaaaaacccaacgttactctaaagagttcaaagccgaagctgtcagaacggttcttgaaaatcaactttcgatcagtgaaggcgcttcccgattatctcttcctgaaggcactttaggacaatgggttaccgccgccagaaaagggctcggtactcctggttcccgcacggtggctgaactggaatctgaaattctgcaactgcgtaaggcgttaaatgaagctcgccttgagcgagatatattaaaaaaagcaacagcgtattttgcacaggagtcgctgaaaaatacgcgttaatcgaacaatggcgacaacaatttcccattgaagcgatgtgtcaggtatttggtgtatccaggagcggttattacaactgggtacagcatgaaccctcagacagaaaacaaagtgatgagcggctaaaactggagattaaggtggcacatatccgcactcgcgaaacatatggaacccggcggctccagacggagctggcagagaatggcatcatcgttggtcgtgaccgactggcacgtcttcgtaaggagctaaggctacgctgtaagcagaaacgcaagttcagagcgactacgaactcgaaccacaatctgccagttgcgccaaatctgctgaaccagacgttcgctcctacagcaccaaatcaggtctgggtggcggacctgacgtatgttgccacacaggagggatggttgtacctcgctggcatcaaagatgtttatacgtgcgaaattgtcggctacgccatgggagagcgcatgacaaaagagctgacaggtaaagccctgtttatggcgctcaggagccagcgcccacctgccgggctaatccaccactctgatcgaggttcacagtactgcgcatacgattaccgggtcatacaggagcagtttggtctgaaaacatcaatgtcgcgtaaaggtaactgttacgacaacgctccgatggaaagcttctggggaacgctgaaaaatgagagcctgagccactatcgttttaataaccgggatgaagccatctcagtaatacgggaatacattgagattttctacaatcgtcagcgtcgtcactctcgtctggggaatatctccccggcagccttcagggaaaaatatcatcagatggctgcttaaaaaaagaacaaatggtagtgtccgctattgccagtacacctcattgagccagttactgaattgtataccgacgttgtatgggcgtcgttcaacacactgcacaataaaattaatccgtataaggaaaactgatatggcaactttgacaaaaaaagaacgggcatggttgaacgaattacaggaagttcttgatcgctgtcctgtggtgtcatcctgccgcgattgcgttcttagtccgtggctattgcaccaccatcacgcgaaagggacagctaagcgcggcgggatggttaagccagcaacattaaccgttgcatttaaaaaagcccgggattctgtggattacaactggcgtgctaatggcaccccaccctctttccatgagcagagatctttatcagagcgattgttcagagagcagggggttgataccaaaattttgctaggccattcgaatcaaaaaatgaccgatatttacaacgatgtacgcggtaaggagtggaaaaaactggtcatttgataaccagttttgcagaggttttgcagagaaaattaaaagcggtacccggcagagaacataaacacccacggatccagtcgtaccgagtcttttacggtagtaacaccagatttgtacttagccgtggtatcgatatccatgtaccacactgacatgttaaccaaccagtcacggttaatcagataatcaacccccacctgcccggcagctccccagtaatctttcagactgagatcggaaagccccgcctctttgccatgatcgttaaatccattatcaaagaaggtggtgtagttaatacctgccccaacataaggacggaatttgctgccggcatcaccaaaataccactgcgccatcagtgttggcggcagatgatgaacggttgcaatatcgccggtcgcccgggtgccgattttatggcggaacggcgtcgctgccagtaattccacaccaatgttgtcggtcgccatataagtaaacgtcaggcccagttgcgtgttattggtcacgctgaatccacccagacttcctaacgtaccaccagcaccttctgttggacgtacggttgcagaacctgcacgcataaaaaattcgcctgcttcatgcgcaaaggcactgccagagagaagagttgttactgccaaagccgccactgttaactttttcatatccgctccgtcgttatggttataaaaacgtgacgaatatacctacattggagtaacaaatgatcctacatagatcacattacatatgataattcaccctttattgatctggattaatttagaagttgcattgagaatcctggttaacgtgatttaaatcaatttttagatattttcgctacgcaaatattaactcgttcgccacttgccgcggtttgcccacgcctgaaggccagcaattacctccgctttacaaagatatgcttttccatacaagacctgatgctgccacccgaggcttaaccagggtacaattgcccgctaattaacacctgcataaaactcaaggagagtgcatgtctatcacggcgcagtccgtataccgtgacaccggaaatttcttccgtaatcaatttatgaccattctgttggtatcgttgctatgtgcgtttatcacagtggtgttagggcatgttttctcacccagtgatgcacagcttgcgcagctcaatgacggcgtgcccgttagcggcagtagtgggttgttcgacctggttcagaatatgtcaccggaacaacaacaaattttgctgcaggcttcagcggcgtccactttttcaggattaatcggtaacgccattctcgccggaggcgtaatattaattatccagctggtgtctgcgggtcagagagtcagtgcgctgcgagctattggtgccagtgcgccgatattgcccaagttatttattctgatttttctgactacccttttagtacagattggcatcatgctggtggtcgttccgggaattatcatggccattttactggccctggcaccggtgatgctggtacaggacaaaatgggcatttttgcctcgatgcgtagcagtatgcggctgacttgggcgaatatgcgtctggtggcacccgcagtactgagctggttgctggcaaaaacactgttgctgctttttgcctcttcttttgccgcattaaccccggaaattggtgccgtactggcgaacaccttgagcaacctgatttcagccatattgctcatctatctgttccgcctgtatatgttgattcgccaataaccttaagcatttgattacggaatcgtaaaatgaagcagtttcttgattttttaccgctggttgtctttttcgcgttttacaagatttatgacatctatgcggctactgcggcgctgatcgtcgccacggcgattgtgcttatctatagctgggttcgctttcgtaaggttgagaagatggccctgatcacttttgttctggtggtcgtcttcggtggcttgacgctgttcttccacaatgatgagtttattaaatggaaggttacagtcatttatgctctgtttgcgggagccctgttagtcagccaatgggtgatgaaaaagccgctaattcagcggatgctgggtaaagaactcacgctgccgcaaccggtatggtcgaagctaaatctggcctgggctgttttctttatcctttgcggtctggcaaacatctacatcgcattctggctgccgcaaaatatttgggtcaactttaaagtctttggcctgaccgcccttaccttaatcttcacattgttaagcggtatctatatctaccgccacatgccgcaggaagataaatcctaaccagactgccagtccttcggggctggcgctgtatctcctctgttctcctcaggaaaatcatagtagcatcgcgcctgtgattttccttttaagtcggttttaccatgtctacaacacataacgtccctcagggcgatcttgttttacgtactttagccatgcccgccgataccaatgccaatggtgacatctttggtggttggttaatgtcacaaatggatattggcggcgctattctggcaaaagaaattgcccacggtcgcgtagtgactgtgcgggttgaaggaatgactttcttacggccggttgcggtcggcgatgtggtgtgctgctatgcacgctgtgtccagaaagggacgacatcggtcagcattaatattgaagtgtgggtgaaaaaagtagcgtctgaaccaatcgggcaacgctataaagcgacagaagcattatttaagtatgtcgcggttgatcctgaaggaaaacctcgcgccttacctgttgagtaatagtcaaaagcctccggtcggaggcttttgactttctacttactgaatttcggtggtgccgttaattttaaacaggatattcaccacaatcccactgcctggcttacccggctcataacgccatctgcgcatcgcatttttcacctcacgctcaaacatgttcgcaggcttggctgagaggatttgtacgttatccacgcgaccatccggcgtgacgtcaaatttaactttaacctgcccttcaatgcgcaatgcctgtgctcgtgccggatactgcggctgattacggcttaatgcgcgtggtcctgaagccacactggtaaccggcttgctggttgcagccgttgccgtacttgatgtggggcgcgcgggtgccgtattttcaaacggtgatgccggacgcgactctacgggtttgacatcgcgttttggctgctcctgtacctttttcaccggcttcggttttggcttaggtttcggcttcggcttttcaatgaccaccggtgcttcttttggcggttcggggatcggctcaggttccggttctggctctaccaccggctccggtggcggctgaacggcttgtggcggttcgagatcagcaggcgcaaccatcgtgacagaaattggctgcgcaggcgcaggtagttcaataacctgatgtaccgaggtatagagcagacccgccacaacagcaccatgaatgcagaccgaaagtaacgtcggccaggggaagcggcgaggtaaatcaagggtcattgtattgtagctattcggcattgtagcattagccataacgtttataagttcatctttaaatgataatcaattgcatgggagtttatcaccgtgagaaccgtaataacatacttgagattctcatcagccatacaaggcgctgaaggtgcagattcaaccagacgacaaaacgacctgttcaagcagtggctgaagaagaatggcgatgctcaaatagtagcgtctttcagtgatgaagggttgagtggttacaaaggtaaacaccttactggtcagtttggtgacatgttagcccgtattgaggctggggagtttccagaaggtacaattctgctagttgagagtatcgaccgtataggccgattagagcatcttgaaacagaagccttgatgaaccgcatcttaggcaacgggatagagattcacacattgcaagatggccttatctacacaaaggatgctttagccgatgaccttggcataagcatcatccagcgtgtcaaagcctacatagcgcatcagaaatctaagcagaagtctttccgtgtttctcagaaatgggggcaacgtgcaaaacttgcccttgctggtgaacaacgtcttacaaagatggttcctggatggattgaccctgagacttttaaactcaatgaacacgctgagactgtgagattgatattcaaactgctgctagatggtgaaagtctgcataacattgcacgtcaccttcaaagcaacggtataaagtcgtttagtcgccgtaaagatgctaatgggttctctgttcactctgtacgcaccattctaaggtcagagacaacaataggcacgttaccagcatcacaacgtaatgaccgccccgctataccgaactactacgaaggtgttgtagatataccaacgttcaataaagctcaagagattctcgacaagaatcgtaaaggccgtacacctgcaagtgacaacccactaacgattaacatcttcaaaggtctgtttaggtgtcagtgtggggctagtgtccatcctaccggaacaaagaataagtatgctggggtctacaggtgcaataaccacttagacggtcgctgtgatgttccaccgttgaagcgtaaaccgtttgaccgatggatgattgataattttctggggatgattgacgtggggaatgatggagaatcagagagaaagattgcagcgttacagcatgaggttgaaattgtcacagccagaatcaagaaagctaccgccctacttcttgagatggatgatattgatgaactaaaaattcagcttaaggaactgaaccagaagcgcacagaactacagaccacgattgataacatgaggcgtaaggcttcactcactgataaggaactaccccagcttaaagatattgaccttatgactaaagcgggtcgtgtcgagtgtcagttgattttgtccaagcatctaaaagggcttacattgggtaaggattcggtaactgtaacgctacagaacgacactgaaatcaccatacctacaaacccgttaccgctaaatgatgggtcaccaatctttgaaattgctgataaagagctactggatattgacgcttatcaactgtaattttcaggggctatgaagcccctttttatgtctcaataagtgcccttcttgttagggttcacagagtactttcgcagagcattacccggcttaagcacctttgaagcttgctcattagcggcatctgagaaggtgctctcaccatttttaacgctaacgctcttagagcacgttacacgggcttttagcgcttcatctgataactcacttgccgaatagccaaaaagctctttacaggtcagcatagggcttccaaggctcgttgtagtgtttccggtgttctttttactggtagcaccgccatcattcgtggtagcggtctttccagtagcagccgaaacatcagtctgacctacgattgaacgaaactctacaccttggaaggtcatctgaatacgaagaccgttagcaatggtatgctctttactcgctttaaactgagtaatgatactatcagtgatagctattccatctctacaaacaatagtgatgatttgcttctggtctcgccattgttcaaccgtagaaataaaggtttctacaagttgcccctgtctggttaatagaactgaacccgtcgaatcaaccactacaacaccgctaatagagatggtcttaggtgctctctgaacattatcagtgatagtttgccccgattgcatagcctgagttgtcaccatcatcggtgagtcatagtccatctgttcagtagctgttaaggcaagaaaagattccacattatctctaaggtgaaaatagataccatctttacctgagtatctaatttgctttgtgtcaaacattgttgttattcctattctgttaagcgtgagctacgtgaaatctaatttttgatgttggtatctgttcagaagatttcacgtagcattcgactattcatagttgaatcgtcatactagataaagattaatagattgccatgtgtggcaataaatattagtagctctaacattgtttattcctctggataagctgagctaatcaaggtatcttcctgcatacgattaatatgcgatgtggttctttcatcaataacctttccatcaagtaccgtctgagttgtgatattgattgtctgaggctgaatatttactgacggtttgataacctttaaatcttgtgtgaatgtttccactcgacctttcagattatttaatgcttcaggtgaaaactgtggaacatcttttgatttgccctgaaccatagcccataaaacagcggctaaagagttcatgtcaccagtcaatgcttggtctgtgggttccacctttgaccttacaactttatcaattggattatctgacttactcatctgacgttcatagaacggtttgacaatggcattaatcacatcagtttgaggtgtactggcaatagcggacactaccatttgttctttttttaagcagccatctgatgatatttttccctgaaggctgccggggagatattccccagacgagagtgacgacgctgacgattgtagaaaatctcaatgtattcccgtattactgagatggcttcatcccggttattaaaacgatagtggctcaggctctcatttttcagcgttccccagaagctttccatcggagcgttgtcgtaacagttacctttacgcgacattgatgttttcagaccagactgctcctgtatgacccggtaatcgtatgcgcagtactgtgaacctcgatcagagtggtggattagcccggcaggtgggcgctggctcctgagcgccataaacagggctttacctgtcagctcttttgtcatgcgctctcccatggcgtagccgacaatttcgcacgtataaacatctttgatgccagcgaggtacaaccatccctcctgtgtggcaacatacgtcaggtccgccacccagacctgatttggtgctgtaggagcgaacgtctggttcagcagatttggcgcaactggcagattgtggttcgagttcgtagtcgctctgaacttgcgtttctgcttacagcgtagccttagctccttacgaagacgtgccagtcggtcacgaccaacgatgatgccattctctgccagctccgtctggagccgccgggttccatatgtttcgcgagtgcggatatgtgccaccttaatctccagttttagccgctcatcactttgttttctgtctgagggttcatgctgtacccagttgtaataaccgctcctggatacaccaaatacctgacacatcgcttcaatgggaaattgttgtcgccattgttcgattaacgcgtatttttcagcgactcctgtgcaaaatacgctgttgctttttttaatatatctcgctcaaggcgagcttcatttaacgccttacgcagttgcagaatttcagattccagttcagccaccgtgcgggaaccaggagtaccgagcccttttctggcggcggtaacccattgtcctaaagtgccttcaggaagagataatcgggaagcgccttcactgatcgaaagttgattttcaggaaccgttctgacagcttcggctttgaactctttagagtaacgttgggtttttctgctcattattagctccttctgatgccattctatttcaggaaggagtgtccgttaaactcaggctacctcattccttatagccggtcagtgcattcactaccacaagcagataataactttatctgtatttctttatatgatgtgagcatattcaggaaaaatgacctttcctgaggtacagttgctcgctcaaatcctttgattactgcggataaagtcatctactattgtttaacacattcacgcgctgcatgtatgttcagaaaatgtgcacgctaagataattaaacaaaattgtggttacagaggtatcagtgagtcactgggctacattcaaacaaacagcaacaaatttatgggtgacccttcggcacgacattctcgcgctggccgtctttttaaatggattgcttatttttaaaacaatctatggtatgtcggtcaatttgcttgatattttccatatcaaagcattttcagagttggatctctccttgctggcaaacgccccactatttatgctcggcgtctttcttgtcctgaactccattggcttactgttccgggcaaagctcgcatgggcaatcagtatcattttgttgttgatagcgctaatttacaccctgcatttttatccctggctgaaatttagtattggattttgcatttttacgctggtgtttttgctgatactgcgcaaagacttctcccacagtagcgccgcagccgggacaatttttgcatttattagtttcacgacattactgttttactcaacctacggtgcgctttatttaagcgaaggttttaatccgcgaatagaaagtttgatgaccgcgttctatttttcgatagaaaccatgtcaaccgtcggctatggcgatattgtccctgtttctgaatcagcacgattgttcactatttcggtcattatttccggcattaccgtttttgccacatctatgacctcaatttttggtccgcttatccgcgggggattcaacaaacttgtaaaaggaaacaatcatacaatgcatcgtaaagatcattttattgtttgcggacattcgattctcgccatcaatacgatcctgcaactgaatcaacgcggacaaaacgtaacggttatcagcaacttgcctgaagatgatatcaagcaacttgagcaacgcttaggcgataacgctgatgttatccccggtgacagtaatgacagttcagtattaaagaaagcgggaatcgatcgttgccgggccattctggcgctgagtgataacgatgcagataacgcgtttgttgtactctcggcaaaagatatgagcagtgatgtcaaaacagttctcgccgtcagtgatagcaaaaacctgaataagattaagatggtacatccggatatcattctctcaccgcaactgtttggcagcgaaattctggcgcgagttttaaatggtgaagagattaataatgatatgctcgtttcaatgttgttgaactccggtcatggcattttcagcgataacgatgaacaagaaacgaaagctgacagtaaagaatcagtgcaaaaatagagtttaaagacgaaagagtaaacttattgggcaccgcaatggtgcccagtatatttagatattgtagatcgcaaacaataacgagttacgctgtttgtttagaatgcacttcctgatgctgtggatacgcatatttcggcgcgattgcccctcaagccaacgcgatttacgtcggctagcctgacgctgcatgcgccagcgccccacttccgttctactccgcttcatgttaactactctatgcaataacagaatggtcattatacccccacccccgacgctgaccagtgcttttcccgcgtttttatttgccagatgaatccatatgcgtaaactcataacaatgcgctttcaaaaggatttctaatctatgacaaccgtttatacgttggtgagttggttggccattctgggatactggttgctcattgcaggcgtaactttacgcattctaatgaaacgacgcgcagttccctccgcgatggcctggctgttgattatttacattctgccgttagtcggaattattgcctatcttgccgttggcgagctccatttaggcaaacgccgcgctgagcgcgccagagcgatgtggccttccaccgcaaaatggcttaacgaccttaaagcctgtaagcatatcttcgccgaagaaaatagcagtgtcgctgcgccattattcaagctttgcgagcgtcgtcaggggatcgctggggtcaaagggaatcagctacaactgatgaccgagtcagatgatgtgatgcaggcgttaatccgcgacatccagctcgcgcgccataatattgagatggtgttttatatctggcagcccggcggcatggcggaccaggtggctgaatcattaatggcggctgcacggcgtggtattcattgccgattgatgctcgactccgccgggagtgtggcttttttccgcagcccgtggcccgagctaatgcgtaatgccggtattgaagtggtcgaagccttaaaggtcaatctgatgcgtgtgtttttacgccgtatggacctgcgccaacatcgcaagatgatcatgatcgataattacatcgcgtacaccggcagcatgaatatggtcgatcctcgctacttcaaacaagatgcgggcgtagggcaatggattgatctgatggcgcgtatggaaggccccatcgccaccgcgatggggattatttattcctgcgactgggagattgaaaccggaaaacgtattctgccgccaccaccagatgtcaatattatgccgtttgaacaggccagcggtcacaccattcacacaattgcttctggccccggctttccggaagatctcattcaccaggcattattgactgcggcttattcggcgcgtgaatatttgatcatgacaacgccctactttgtgccaagcgatgatttacttcatgcgatttgcacggcggcgcagcgcggggtggatgtcagtattatccttccgcgaaaaaatgactcgatgctggtcggctgggccagtcgcgcattctttacggaactgcttgctgctggggttaaaatttatcagtttgaaggcgggttactgcataccaagagcgtgctggtcgatggcgaactaagtctggttggcaccgttaaccttgatatgcgtagtctgtggctgaatttcgagattaccctggcaatcgacgataaaggttttggtgcagaccttgccgccgttcaggacgattatatttcgcgttcacgtctgctcgatgcccgtttatggctaaaacgtccattatggcaacgtgtcgccgagcgactgttttacttcttcagcccgttgctgtaaaacgtcgccaacagaggttaaacaggtagtgactatggatatggatctaaacaatcgcctgactgaagatgaaacgcttgagcaggcctacgatatttttctcgaactggctgccgacaatctcgacccagctgatgttctgctgttcaatcttcagtttgaagagcgcggcggcgcggagttattcgatccggcggaagactggcaggaacatgttgatttcgatttgaacccggacttttttgccgaagtggtgattggtctggcggacagtgaggatggtgaaatcaacgatgttttcgcccgcattctgttatgccgcgaaaaagatcacaaactttgccatatcatctggcgggaataaataatcgctttcggcgtgaaaaagggctgacaactgtcagcccttattgtgtttaaagcggatcgactttcaggcaagaaacggcgtgtctgaaactcccttccagcacaggacgtgttttggcgcactccggaccggcaatcgggcaacaggtacggaaaacacaaccggaaggcgggttgatcggcgacggtaattccccttccagtaactggatggttttgttcttctccagatccggatcaggtatggggactgccgacatcaatgccctggtgtaaggatgtagtggattgtggtagacctcatcataggtccccagttctaccgcatggccgagatacatcaccaacacacgatcggaaatgtgttttaccacggccaggtcatgagcgataaaaattaatgacaatcccatctcacgttgcagctgctggagcaggttgaccacctgcgcctgaattgacacgtccagcgccgaaatcggctcatcgcagataatcagcttcggttcaagaataagagcacgagcaatcccgatacgctggcactgcccaccggagaactcatgcggatagcggttaatcaggttaggcaataacccgactttcagcatcatcgccttcacgcgctcgcgaacttcctggcgtgacattttcggatgataagtacgcagtggttcagcgatgatctcgccgatggtcatacgcgggtttagcgatgccaacggatcctggaaaatcatctgaatatcactgcgaacggcacgccattcatcgggcttcatgcccagcaactctttacctaaccaggcaacatgaccgtcggtcgctttaaccaggccaatgatggcgcgagcaaaggtggacttaccgcatcccgattcccctaccacacctaatgtttccccttcatacaggcgaagcgtgacaccatcgacggctttgagagttttcggcggttgccagaaccactgtttgccatctttgatttcaaagtgcactttcagatcggcgatttcgaggaggacttttcttccttcggttacagcattcataacagttcctccaccggtttaaagcaagcacgcagacggccaggcgtaaactcttccagcggcggtgcgctactacaaatttccatcgcatgcggacaacgtggctggaacgggcaacctttcggtaatcgcagcaggtttggcggattaccagggatggtcaacattgtttcaccttccgcatcgagacgcggcaccgcgttgagcaaaccgatagaataaggatgaacgggttgataaaagacatcgcgcgcgttgccatattccatcgtgcgcccggcgtacattaccagcactttgtcgcagatccccgccaccacgccaagatcgtgggtaatcataatgatggcggtattaaattcccgcttcagttcatttaatagcgtcatgatctgcgcctgtacggtgacgtccagcgcagtagtgggttcatccgcaatcagcagcttaggtcgacatagcaatgccatcgcaatcataactcgctgacgcatgccaccagaaaattcgtgcgggtacattttcatgcgtttacgtgcttccggcatttttaccgcatcgagcatccgcaccgactcttcaaacgcctcagctttgctcatgttcttatgcagcatcagcacttccatcaactgctcaccgacgcgcatatagggattcaacgaagtcattgggtcctgaaaaatcattgagatttgttcagcgcgcagtttattgagttcacgctctggcaaattgaggatttcacgcccattgaaggttgccgatccgccaatacgtccgttggcagccaacaggcccatcaacgcaaatgcagtttgcgatttacccgaaccagactcacctacaatgcccagcgtttctccggcacgtagagaaaaattcaaatcattgaccgccgtgacatcgccgtccggggtactaaaggtgacacgcaaatctttcacgttcagcagtgcgtcagcctgttgttgtgcgagcggcacagttgcagtttcaattacgctcatggctgcactccttaacgatctttcgggtcgagagcatcacgcaagccatcgccgataaagttgaaacaaaacagcgtcaccacgaggaatcccgctgggaacaacaataaccatggagagacttccatcgagttcgcgccatcactcagcaatgcaccccagctgcttaacggctcttgcgtacccaaccccaggaagctaaggaaagattcaaagaggatcatgctgggcaccagaagtgatgcgtagaccaccaccacaccgagtacattcggcacaatgtggcgaataacaatgcccgatgtcgatacaccgccaacttgtgccgcctcaataaactctttgcgcttcagactcagggtttgtccacgcacaatacgagccatatccagccaggaaaccatgccaatcgccacgaaaatcagcaggatgttttgaccgaaaaaggtcacaagcaaaatgacgaagaacatgaatgggaaggagttgaggatttccagcagacgcatcattaccgaatccactttaccgcccagataaccggaaagcgaaccgtaaagtgtccccacgaccactgccaccagtgccgcagcaacaccgaccatgagtgagatacgcccgccaatcgcaacgcgcacaagcaggtcgcgaccggatgagtcagtaccaaagtagtgaccggactccatatccggggcgctggacatcatcgcccagtcagtatcgtcataggcaaactgcgaaagcatcggtgccaggattacaaataacgcgatcagcaccagcactatcagactggcaaccgccgcacggttatgcataaaacgtcgacgtgcgtcctgccacaagctgcgcccttcgacctccagcttttcactgaaattttccagcgtctcgctgtttttcttacttaacatcatcgcgagctccagtatcagtaacggattttcgggtcgataaccgcatatagcacatcgacaatggcattaaacaaaatggttaaagcaccaaccaggatggtcaggcttaacactaaggaatagtcacggttcaatgcgccattaacgaacagttgtccaatccccggcaaaccataaatggtttcgataaccatagaaccggtaataatgccgacaaatgcggggcccatataagagagcacgggtaacagagcaggttttaatgcgtggcgtaaaatgatccgccgcataggtaaccctttcgcccgggcagtacgaataaagttggagtgtaatacttcaatcatagagcctcgggtaatacgcgcaatactggcgatataagcgagtgacaacgccaccatcggcaatatcatgaatttaagcgccccaccattccagccaccgcccggcagccaatgcaaaatgatcgcaaatatcatgactaataatggcgcaaccacaaaactggggataacaaccccggtcattgccagccccatcacggtatagtcccatttggtgttttgttttaatgcgacaataacgccagcactaacacccagtattaccgcaaggaaaaatgcggcggctcccagtttggcagaaacgggaaaactggatgcaaccaggtcattgaccgaataatctttatatttaaacgatggaccgaaatcaccgtgcgccagttgtttcaggtagctgaaatactgtgtcatgatcggatcattaagatgatatttcgcttcgatattggccatcacttccggcggtaaagtacgttcgccggtaaaagggcttcccggcgcgaggcgcatcataaagaacgaaatagtaataagaataaatagcgtcggaatcgcttccagacagcgacgtagaataaattttaacattgccctaccttctggcctgtgccttctgtaatgcgataaaaatcagacaccgtggagcaggacactcctgccccacgtattgccattagtgcttcacaatgtacatattccgggtgtaggtattatccagcggatctttgccggtatagccaccaacccacggtttcaccagacgcgcattcacgtagtaataaacaggaacaatggccgaatccttatccagctgttgttctgctttagtgtacagagctgtgcgctgcgcctcgtcagtcactttcagcgtttccgccataatgctgtcaaaggccgggctcttataatgcgcggtattcatcgagctgttcgacagcatggtgttcaggaaggaagttggttcgttgtagtctgcacaccagcctgcacgggccacatcaaaagtgccctggtgacgggtgtcgaggaacgttttccactcctggttaaccagtttgacgtttacaccaatgtttttcttccacaatgaagaggcagcaatcgccagctttttatgcagatcagaggtgttatacagcaggttgatggtcaacggtttgtctgcggtataacccgcttcagccagcagttttttcgcttcttcgttacgtttttcctggctccagccaaaccattctggctgagtcaattttgcgccatcagtatacggtggagtgtaaccataggcgggcatgtcgccctgcgctttcactttattaacaatgatatcgcggtccatacctagtttcagtgcggtacgcacacgcacatcgttgaatggcggtttctggttgttaatttcgtaatagtaagtgcacaggtatggatcaacgtgaacttcgtccgggatctcttttttcagcttctggaacaattcgatcggcatgttgttatacgtcatgtcgatttcaccactacggtagcggttgacatcggtaacttcagaagcaataggcaaataggttacctggttaataacggttttcgcgttgttccagtaggtcgggctgcgttcaagaacgattcgttcgtttacgacccaatcttttaaggtataggcaccgttggtgacgatattaccaggctgggtccatttttcgccgaatttctcgatagcggcttttggcaccggtgaagttgatgggtgaacaagtaatttatagaagtacggaacgggttcacttaaggtgacttctaatgtgtgatcatcaatagctttcacgccgagatcggtaatcggttttttcccttcaagaatttcatcaataccggcgatatgcccatattgcagataactggcatacggagaagcagtgttcggatcaacagaacgttgccagctatacacaaagtcttgtgctgtgactggcgtgctatcagaccatttcgcatctttacgcaaatggaaggtccagactttcgcgtctttattatcccaggattcagcgacgccaggtgctggatgaccgtcaagatcgctgaccagtaagccttcaaacaggtctcggctgatattagactccggaacaccttcaattttgtgcggatctaatgactgaacttctgaaccattgttacgtaccagtgtttgtttttccgccagtgtgacgcctgcgggtacatcagctgccagcgcgacattccctgccattagcgcagccagaacgccagctgctactaaacttctcttggtgatgttggtcattgttttttggactccctcattataattactggtattaaccagcatgtgtaatcccggattgggaccctgcacaggctcggagactttctgctgtcaggttactttatcgttacgtattactatcaccgactttatttattctggtgattcagacgatcaccttatgtcgattcgtactgtgtctcccctgtcgagacacattattctttcgcgacgctctttaattgttaattattctcattaccaataaagaatcgtctggcggttgcccggaaagtaccaaatgcggttcttactcgccaatacattttgcaaaattgttaagcaattctcttttattgaccgtatcagaatctatagcttgcatccatgccttaacaaacatctttcaattcaatcaaatagagattggctaagcatgtctatcttttctgattacagttccagtagtgaaatgcacaataatttaacaattgattattatttagcactttcctctaccaaaggcagtggaattactaatatcatttcaattattcttcagcaagcccaggattatgatgtggcgaaaataacatgatggtgaggagaagcagttaaggaaatccttataactaactgtaatttgagaagaatatttttacctattccttttgcttttgataactgcgcgggaacaaagtaaaaataatgacgaagtaaacggagcatggcagctccgtttcatttgaaaggaattaattaagcaggccggggaaaatccccttaataccagtaacgataaattcaatccccaatgccatcagcaatagccccataatacgcgtaatcacgttgatgccggtctggcgtaaaacccgtaccagccacggtgccatgcggaacaatccccagcaacataaagcgaacaatgcaatagccacaaagaaaccaaacagatagctaatgctgtgataacgcgtaccccagacgatggtagaactgatcgcccctggccccgccatcaacggcaacgccaatggcaccacaccaatgctttcacgtaccgcggtttctgatttttcttgcttgttctgtttatcctcgccaagcttgccgctgatcatcgacatcgctatcgtcaccaccaggatgccccctgcgatacggaacgaatcaattgatataccaaaaagttgcagaatcgtgtcgccgagaaaaagcgagatccacaagataatggccacagacaggttggctgtaaggttagttttgtttcgcgctgccgctgtctgataactggtcatgctgataaagacgggaataatccctaccgggttgaccagcgcaaataacccgatgaaaaatttgaagtaaacgggaaaatccaaaaaggtctgaatcacggttagctccgaagcaaaagccggataatgttagccataaattaaggttgaaaagacgcgctgacaatacgccttttgacagcatttttcacctcctaactacttaaaattgctatcattcgttattgttatctagttgtgcaaaacatgctaatgtagccaccaaatcatactacaatttattaactgttagctataatggcgaaaagcgatgctgaaaggtgtcagcttagcaaaaatttgatttggatcacgtaatcagtacccagaagtgagtaatcttgcttacgccacctagaagtgacgcattagagataataactctaatgtttaaactcttttagtaaatcacagtgagtgtgagcgcgagtaagcttttgattttcataggttaagcaaatcatcaccgcactgactatactctcgtattcgagcagatgatttactaaaaaagtttaacattatcaggagagcattatggctgttactaatgtcgctgaacttaacgcactcgtagagcgtgtaaaaaaagcccagcgtgaatatgccagtttcactcaagagcaagtagacaaaatcttccgcgccgccgctctggctgctgcagatgctcgaatcccactcgcgaaaatggccgttgccgaatccggcatgggtatcgtcgaagataaagtgatcaaaaaccactttgcttctgaatatatctacaacgcctataaagatgaaaaaacctgtggtgttctgtctgaagacgacacttttggtaccatcactatcgctgaaccaatcggtattatttgcggtatcgttccgaccactaacccgacttcaactgctatcttcaaatcgctgatcagtctgaagacccgtaacgccattatcttctccccgcacccgcgtgcaaaagatgccaccaacaaagcggctgatatcgttctgcaggctgctatcgctgccggtgctccgaaagatctgatcggctggatcgatcaaccttctgttgaactgtctaacgcactgatgcaccacccagacatcaacctgatcctcgcgactggtggtccgggcatggttaaagccgcatacagctccggtaaaccagctatcggtgtaggcgcgggcaacactccagttgttatcgatgaaactgctgatatcaaacgtgcagttgcatctgtactgatgtccaaaaccttcgacaacggcgtaatctgtgcttctgaacagtctgttgttgttgttgactctgtttatgacgctgtacgtgaacgttttgcaacccacggcggctatctgttgcagggtaaagagctgaaagctgttcaggatgttatcctgaaaaacggtgcgctgaacgcggctatcgttggtcagccagcctataaaattgctgaactggcaggcttctctgtaccagaaaacaccaagattctgatcggtgaagtgaccgttgttgatgaaagcgaaccgttcgcacatgaaaaactgtccccgactctggcaatgtaccgcgctaaagatttcgaagacgcggtagaaaaagcagagaaactggttgctatgggcggtatcggtcatacctcttgcctgtacactgaccaggataaccaaccggctcgcgtttcttacttcggtcagaaaatgaaaacggctcgtatcctgattaacaccccagcgtctcagggtggtatcggtgacctgtataacttcaaactcgcaccttccctgactctgggttgtggttcctgggggggtaactccatctctgaaaacgttggtccgaaacacctgatcaacaagaaaaccgttgctaagcgagctgaaaacatgttgtggcacaaacttccgaaatctatctacttccgccgtggctccctgccaatcgcgctggatgaagtgattactgatggccacaaacgtgcgctcatcgtgactgaccgcttcctgttcaacaatggttatgctgatcagatcacttccgtactgaaagcagcaggcgttgaaactgaagtcttcttcgaagtagaagcggacccgaccctgagcatcgttcgtaaaggtgcagaactggcaaactccttcaaaccagacgtgattatcgcgctgggtggtggttccccgatggacgccgcgaagattatgtgggttatgtacgaacatccggaaactcacttcgaagagctggcgctgcgctttatggatatccgtaaacgtatctacaagttcccgaaaatgggcgtgaaagcgaaaatgatcgctgtcaccaccacttctggtacaggttctgaagtcactccgtttgcggttgtaactgacgacgctactggtcagaaatatccgctggcagactatgcgctgactccggatatggcgattgtcgacgccaacctggttatggacatgccgaagtccctgtgtgctttcggtggtctggacgcagtaactcacgccatggaagcttatgtttctgtactggcatctgagttctctgatggtcaggctctgcaggcactgaaactgctgaaagaatatctgccagcgtcctaccacgaagggtctaaaaatccggtagcgcgtgaacgtgttcacagtgcagcaactatcgcgggtatcgcatttgcgaacgccttcctgggtgtatgtcactcaatggcgcacaaactgggttcccagttccatattccgcacggtctggcaaacgccctgctgatttgtaacgttattcgctacaatgcgaacgacaacccgaccaagcagactgcattcagccagtatgaccgtccgcaggctcgccgtcgttatgctgaaattgccgaccacttgggtctgagcgcaccgggcgaccgtactgctgctaagatcgagaaactgctggcatggctggaaacgctgaaagctgaactgggtattccgaaatctatccgtgaagctggcgttcaggaagcagacttcctggcgaacgtggataaactgtctgaagatgcattcgatgaccagtgcaccggcgctaacccgcgttacccgctgatctccgagctgaaacagatcctgctggatacctactacggtcgtgattatgtagaaggtgaaactgcagcgaaaaaagaagccgctccggctaaagctgagaaaaaagcgaaaaaatccgcttaatcagtagcgctgtctggcaatataaacggccccttctggggtaatgccagtcagttaagcaactgactggctctttttcggggctgtggggtatttccagggcctctcctttaccactctcgggaaggccctttcccttctcgtcggtaatttcacaagttgtcccatacttgcaagatcgcgcatcagctccggtatacgtcccggtgaagcgccctgcaatgtcatcagcattctcatcaccattccgcatgattctgagaaactcagttgattcggccagtaacctttcagatgttccgccattttaatcatctgatatctcaccagattataagccagtaagacaccccacagctcttgctccacaagctccggctttttacttctcagcgtcagcctgctcagttgcatcgtctgttttatctccctgtatcccagttcgatttcccagcgatgactgtacagatccgccatttctcctccggggaagcgcatggcgtccgtcatcgacgtcagcagatggcagacttttcctttgcgcgtcacggtcagcaggcgggctgtcacttcatttcccagtcccggccacttttttcgtgcctgcgggctggttttcagcttcaccagatgatcgcctttacccagttttctgagctcttcatattgcgctccctttctgagaggtatcatccagtggcggtgttctcccgccaggctccaggcatttaacagtcccagtgagtaataacctttatccattaacgtcagagtgttatcgccggtttgttctataagttgctcagcaagctcattttcgctgttcttcatcgtgccgaaggctgcagccgtcagcagatggctggtcagttccatctggcagaccattttgacctgcgggtagagcgccgggttcccggcatgtgtctggcgggggaaggctgcatcgttctctggtgtatccggtgtgcgccagaacacaccatcgatggccagcagggtcaggccgcaccagtgcggatgcggcgtggcgttatgccagagctgcgctgttttcgtgaacacgcggcggacagcctcacttcccaggcgctggcgggcctgaataacggcactgggggcaacgaaggggcgattgcccggcagcatgatgtccaggcgattcacaatctggtgaagaggttctttacgctcaagcgccatgccaacaatacaccagaccatcatttcgaggggaagacggcgcttgcgtagcgttacagtacctgattcggcaaggcaacgagagatgagttcggggtcgaggtaatcccccagagaagtcagtgggttacgcagagaatcgtaacgggataccagatcaagagcctgtccaatgtgcataaaaaaatccggaaacaagtgagcgtttccggattcttacacagccactggatcggtcaactgatccttaactgatcggcattaccccttctggggccgtttttttgtttacccaaagcaacttttccataaaccgacagcattagccttcatcatatttgcgacgatgtataacgcctaaacacagggatattgtactttacaggtcacaagtcaacgtcggtgcttaagagccctgtgaggcgtatagcggcgttaaaaaactgccgagaagggtatatagcccggaagaagtgcgtaaaacgaactgacaggataaaagtgccctgctcaccctgtcagtaaagaaattcttattaatcgtggcgatgcctttcctgaatagccgttaatgagccgacttgtaacgcctctttatagtgtttacggcatacagaaacgtatcgttcattaccaccaattaccacctgctcaccttcgttataaggtctgcctgcttgatcaagacgcagcaccatgcttgctttacggccacaaaaacagatggtttttaattcaaccagtttgtcggaccatgccagtaagtattggctgccaataaataattcacctcgaaaatcggtacgtaaaccataacaaagtacgggtatatcgagttgatcgacaacctccgataattcatatacttgttgtctggttaaaaactggcattcatcaaccagtacgcaatgaattgcctgctgttcatgttccgcacgaatctcatcaaataatgatgaattttggttaaataattttgcaggcgatgacaaacctatacgcgaactgactttcccggcaccaaagcgatcatcaatttctgccgtatatacgacagtgcgcatgccgcgttcctggtaattgtatgaagattgcaacaatgctgtagacttacccgcattcattgcggaatagtagaaatatagctgtgccatcagccacaggccctcaatgatatgaaataaagttggctggagtttatcataattcgtcagtttttcagctcaacagtatgcacagaagtgggtatatgcgttctcccttacgaagccttgcataatccttctgagctatcattacaactgcctcgcttgttataagcgggtaaatgactactggtaactattcacaatctttaacctgttgcgcaagtaatagccctctgttgacctccaggagatagtgcaatactaagtccatgctcttattgcgactgttctacttttcatcattcgcttaatagggaattctcgtaaacacaactaatacagaagactgaaaggtcgtcagcctacgataatctccccataaaatgtgacatgaatcaggaagttttaacctcacgtgctgcgaaatcatcggtgtaaatagggctatatgccgcgtcttttctggctaattttatgaaaagatatttattggcggcacaaaataaagaacaattttgaattccttacattcctggctattgcacaactgaatttaaggctctattattacctcaacaaaccaccccaatataagtttgagattactacaatgagcgaagcacttaaaattctgaacaacatccgtactcttcgtgcgcaggcaagagaatgtacacttgaaacgctggaagaaatgctggaaaaattagaagttgttgttaacgaacgtcgcgaagaagaaagcgcggctgctgctgaagttgaagagcgcactcgtaagctgcagcaatatcgcgaaatgctgatcgctgacggtattgacccgaacgaactgctgaatagccttgctgccgttaaatctggcaccaaagctaaacgtgctcagcgtccggcaaaatatagctacgttgacgaaaacggcgaaactaaaacctggactggccaaggccgtactccagctgtaatcaaaaaagcaatggatgagcaaggtaaatccctcgacgatttcctgatcaagcaataatcttttgtagattgcacttgcttaaaatcccgccagcggcgggattttttattgtccggtttaagacaatttaataagaataagctataaaaaaacggcgtcgattgctcaacgccgtttcgtggataacaccgatacggatgttacttcttaatgcccatctcttcttcaagccaggctttaaattccgtgccaagggtgttatgacgaataccgtattcaacgaaggcctgcatgtaacctaatttattaccgcagtcatggctcttccctttcatatgataggcttccaccgtttctttttcgatcagcatatcaattgcgtcggtgagctgaatttcatcaccagctcccggaggggtttttgccagcaacggccaaatatccgcgctaagtacgtaacgacccacaatagcgagattagacggcgcaacatccgctttcggtttttctaccacaccaaccatcggtacgctttcacccggcgctaattcaacgcctttgcaatccacaacgccatatgcggtcacatcagcaaccggttcaaccatgatctggctatgacccgtttcatcaaagcggcggatcatctctgccaggttatcctgtgacaaatcggattcatattcatccagaataacatcaggcaaaataacagctaccggttcatcacccactaccgggtgagcacacaataccgcgtgtcccaggcctttcgccagaccctgacgaacttgcataatagtcacgtgcggtggacaaatagactgcacttcatcaagcagttgacgttttacacgtttttccagcattgcttccagttcaaaactggtatcaaagtggttttcaatagagtttttagatgagtgtgtaaccagcacaatttcagtaatgccagccgcaatacattcattcacgacgtattgaattaatggcttatcgacaagtggcagcatctctttcgggatggctttcgtcgccggcaacatcctggttcctaatcccgcaacggggataacggcttttttgactttcgtattaatggcagccatttaaattctcctggactgttcgtgttttgaacgtgttcatatttctgtatcgcatcccagtatatcagcaccccgaaggggctaagttctgaaaaggaggcgagttagcataattaagacaattacttatacgaatggcgacgatagtaccaccagccgacattagcaggtaatgcaaatttagcccgcgttatcgtttgctcattctgcagacaacatcaagcgcagtcgaccaccggttccccatatttggcattgccaggcatcgcatcgctggctcaattgattcaaataagcgttacctaaagtgcctaacggaacaccattactgatttgcacctggtgttcgccggtatttaacgtcgcattcagacccgcagaaaccagaatgagatttttcagttcgcgatgataatagccaactaatagcggaaactgccccggcagattggcctgacggagtaaatggtttacctgcttcaataacgcgcccaactctggcaaccgttgattttggtgtgcaagctgttcctgtaataatccgttaaacaatgcgcgtaataacaaggcagcaagtacgccattatgtccagctcgggtgacatcaaggcaataaaatgccagatcgttttccgaaagtgcggcaatatcaagcaccaggccgggtttgtccgcggcaaccaattgacgataattaacccggcaatgggaaatcacctgctgaaccggcggttgtagttcctgtaataatttcgccgctgcggcagggttatcaaccattgcatcccagtcgcgaaaaagcctttcctcttcctcaacgcgcgaattaaacatgctgggatagagacaggcaaaaaccatctcgcgcaagcgattcagatctttaactggtttcagcaaaacatcttcaacgcccagacgtaacgctttggcaatatctgccatattttcagtggcagatatcaccagaactggggtctggtcgcctctgttacgtatatgctccagcagtttaagcccgttcattcgtggcatcgcgatatcacatatcatcaggtctggagtgaaacctcccagcaactcaagggcatccaccccatcagccgccagtaccgttgtcgctcccaatgaggaaaaccatgaatccagaagcgagcgaaatacctgctcatcttcaacaatgagaatctgttttccgaccaatggctgcgtcatgttctctcccctgactggctttactcaatagtggcatgctattgccacctgcgcctgtcagaattaacttaagtgtagataaaaattctggtcaaatgttggtgcgtaccaacggcaaaagttcgtccattttcctttccactgccagctgtccggccgcaatggcagcgtgcgcgcgatggaaatcaagcgtagatatttgcgggcaaacaggttgaatcagaatatcgggcggatcacctgccatgcggttccttttaaggcggttctccaacacctggatagacgtggtcataatctctgttgccgttggcgctgtcacagcccgacgtgtcgttatgctgcctaacctttctttcagacgcgcatgccacggtagagaatcaccattctcgctattttcttcactgacattaaaggagagcagatcttgttgcatcaaatgagcatcgtgctgcaggtcgaccgctatcacaatatcagcccccaatgcacgcgtaagagaaataggaattgggttaactactgccccatcaaccagccagtagccgttatgtgcaacgggtgccatgagtcctggaatactgcatgatgcgcgaatagcaagatggagatcgccttcagtaaaccataattcacgccccgtacttaaattggtggcaacagccgcaaagcgacgggaacaattttcgatctctgtttccggcattatttcgcgatattgattgaagacacgctcgccgcgcagtaacccaccgcgctgccaggagaggtccatcaggcgtaaaacgtcccaataactgaaagaggttacccaatcttccagcgcagataatcgatcgcatgcataggccgcgcccaccagcgaaccaattgaacatcctgcaacgatatcaatttcaatacccactttttttagcgcattaataacgccaatatgcgaccaacctctcgccgcgccagatcccagcgccagccctatttttatctttctcattattcccgcaagattcccctggaatgcaatcgtagccacatcgctactgctcggttaacatagtgctactcaggcggttaatacgccgttattgtttccagggagattatttgtgtctcagctttgtccctgtggtagtgctgtcgagtatagcctatgttgccacccttatgtgtctggtgaaaaggttgcacctgatccagaacatctcatgcgttcgcgttactgcgcttttgtgatgcaagacgcagattatttaataaagacctggcatccctcttgtggagcagcggcgttacgtgccgaattgatggccggatttgcgcatactgaatggttgggattgaccgtatttgaacattgttggcaggacgccgacaatatcggatttgtcagttttgttgctcgatttaccgaaggtggcaaaacaggtgcaataattgaacgttcgcgatttttgaaagaaaacggtcaatggtactatattgacggtacacgtccgcagtttggtcgcaacgatccctgcccttgtggttcaggtaaaaaatttaaaaagtgctgcggccaataatggttgacggtacggtttagcaaacactctcaacaaggtttttccagcaatgcattcactccaacgtaaagttctgcgtactatttgtccggaccaaaaaggtctgatcgcacgtattaccaatatttgctacaagcacgagttaaatatcgtacagaacaatgaatttgttgatcaccgtaccgggcgcttttttatgcgcacggaactggaagggatttttaatgattccaccctgctggcggatctcgatagcgcattgccagaaggctccgtgcgtgagctgaatcctgccggtcgtcgccggatagtgattctggtcactaaagaagcgcattgccttggcgatttgttgatgaaagccaattacggcggcctggatgtcgaaatcgcggcagttattggtaaccacgatactttacgttctctggttgagcgttttgatattccgtttgagctggtaagccatgaagggttaagccgcaacgagcacgatcaaaagatggcggaagccattgatgcttatcaacctgactatgtggtgctggcgaagtatatgcgggtattaacgccggaatttgtggcacgcttcccgaataaaatcatcaatattcaccattcattcctgcctgcgtttatcggcgcacgtccttatcaccaggcctatgaacgtggtgtgaagattattggcgcaaccgctcactatgtgaatgacaatctggacgaaggcccaatcatcatgcaggacgttattcatgtcgatcatacctacacagctgaagatatgatgcgcgcaggtcgtgacgtcgagaaaaacgtcttaagtcgtgcgctatacaaagtactggcacagcgcgtctttgtttacggtaatcggacgattattctttaatcgccagcaaaaataactggttacctttaatccgttacggatgaaaattacgcaaccagttcatttttctcaacgtaacactttacagcggcgcgtcatttgatatgatgcgccccgcttcccgataagggagcaggccagtaaaaagcattaccccgtggtggggttcccgagcggccaaagggagcagactgtaaatctgccgtcatcgacttcgaaggttcgaatccttcccccaccaccatcacttttcaaaagtccgtaaactctcaaacgaatccgcaattaaatattctgcccaagcggggaaggatgagaagcttcgaccaaggttcgacttgagcgccagcgagagagcgttgccgcaggcaacgacccgaagggcgaagcgcgcagcgctgagtaatccttcccccaccaccatcgcttccttaaataatcaaaacctgttactccgagctaattttgcccgatggcaccacgtttaccgggcctacaatatcctcccctgtaggtcggataagcgaagcgcatccgacaactcaccccgcaccgtgcccataaaaaaaccccgccgaagcagggtctatgtgaactaaaattcgcttagtgacgagcgcgcaccagctggtacttacgtgtcagatactccaccggtacgctccagatgtgtaccagacgcgagaacgggaacagcaggaataacgtcatccccagcaccaggtgcagacggaagataaacgccacaccatcgaggtgttgagaagcgccaccgtggaaggtcaccaccgactgcgcccagccaaccagtttcatcatctcgctaccgtccatatgctgagcggagaacggaatggtcaacaggcccagcgcgcactggataacgagcagcgacaggatcaggatatccgctccggtagtggttgcacgcacgcgtgggctgaacagacgacgcttcagcaacagcacgccgccaatcagacacagcacgccgctggcaccaccagcaaacatcgccattttctgtttcacttcaatcggcagccaggcttcatacatccagtgcggcgtcagcataccgaagaagtgaccaacaaaaatccccagaataccgatatggaacaggttcgacgccaggttcatccctttgcgatccagcatctggctggacgccgcgcgccaggtgtactgcccgtagtcataacgcagccagctaccaatcaggaagaccgccccggctatgtacgggtagatatcaaagaagaacatattcaggaattgcattagtgctgtcctccggtggtgatattcagatattgcggcgcgacggcaccggcaaagcgacgctgatgagcagtgattgctgaatcaccgcagcctttgtcagcaaagaatttaacctgctcttcttcccagacagcatccagcgcctgcggcgtatcatcgcgcgcttcgtcggcaattttttccgccactttgtcgctgtcgatagcggtattggccaatttcagcagcagatcaaacatcacggcataacggctttcacgctgttgcagacgcgcgctcagcaatgccagaatcggcgcgatatctttcaaaccttccacggcttcgctttgcggcagctgcgacaggtactccagatacagcggcagatggtccggtaattcgcggctgtttaactgcaagccgtgctgctcgtactgcgccagcaggtccaccatcgcctggccgcggtcacgggattcaccgtgaacatgttcaaatagcaacagtgacgtggcgcggccacggtcgaacagttcgctgtactgggcctgggcatcgagcggatccatcgccgttaaatcgcgcaggaaaatgcccagcgcatgggcatcttctttcgacagatttttcgacgcagcaatcgcctcaaacatctcttgttgatgctgccataaggcagcatccggatattcaaggagacgcgatacaatcacgagttcgatcatggatgcggctccgttttgctggtcacatcgatggcatcaatacgacggctgttgaacagattgaatttggtatctgaaccgtggcagccatcaccaaaggtaaagccgcagccatttttctccgggaaggcttcccgtgccagttcacgatgactactcggcaccacaaagcgatcttcgtagttagcaatcgccagataacggtacatctcctgtgcctgggcttcggtcagaccgacctcttccagcgcacgggtatcaactttaccgtcaacggtttcagcacgtttgtaatgacgcatcgccagcatacgtttcagtgcgcgcagtaccggtttggtatcaccggcggtcagcagattcgccagatactgtaccggaatacgcaagctttcgacgtctggcagaatgccgttgctacccagctcacccgcgtctgctgcagactgaatcggagacagaggcggcacgtaccagaccatcggcagtgtgcgatattctggatgcagcggcagcgccagtttccattccattgccattttataaaccggcgactgctgtgcggcttcaataacgctcagcggaataccgtctttaatcgcctgctcgatgactttcggatcgttcggatcgaggaacacctccagctgacgctggtaaagatctttctcgttctcggtgctggctgcacgttcaatcgcgtcggcatcgtacagcagcacgccaagataacggatacgaccgacacaggtttctgagcacacggtcggctgacccgcttcaatacgcggatagcagaagatgcacttctcagacttaccgctcttccagttgaagtagatttttttgtacgggcatccggtgatgcacatacgccagccacggcatttatcctggtcgatcaggacgatgccatcttcttcacgcttgtaaatcgcaccgctcgggcaggtcgccacacatgccgggttcaggcagtgttcgcacaggcgcggcaaatacatcataaaggtgttttcgaactggctatacatcgccttctggatgttgtcgaagttcttgtctttcgccagtttgtcaaactcaccacccaggtcatcttcccagttcggccctttttcgattttcgccatccgttccccggtaatcagcgaacgcggacgggcaatcggctgcgatttgctgccttccggcgcggtatgcaggttctgatagtcaaaatcgaacggctcgtaataatcgtcgatccccggcagatgcgggttagcgaagattttacccagcaacatggcacggttacccatgcgcggctgcagtttgccgttgattttacggatccagccgcctttgtatttttcctggttttcccagtcagtcgggaagccctgacccggcttggtttccacgttgttgaaccacgcgtattccacgccttcacggctggtccagacgtttttacaggtaactgaacaggtgtggcagccgatgcacttatcgagattcagcaccatgccgacttgtgaacgaattttcattttacgctctcctgtacctggtcattgccttcgccatctaaccagtcaatgttcttcatcttacgcactacaacaaactcatcgcggttagaacctacggtgccgtagtagttaaagccgtatgccagatgggcatagccgccgatcatatgcgtcggtttcggcgtgatacgggtgaccgagttatggataccaccacgctgttgggtaatttccgaaccaggcaggttaacgatacgttcctgcgcgtggtacatcatggtcatccctgccggaacacgctggctgacaaccgcacgggcagtcagagcaccgttgctgttgaatacttcaatccagtcgttatcggcgatacccagatctttggcatcggcttcactcaaccagaccaccggaccaccgcgacctaaagtcagcatcagcaggttgtcgctgtaggtggagtggataccccacttctggtgcggcgtcaggaagttgagcgctttttccgggttgccgttggatttctggcctatcacttctttcaccgaacgggtgtcgatcggcggacgataaaccagcaggctttcaccgaaatcacgcatccactggtgatcctgatacagttgctgacgaccagagagcgtacgccatgggatcagctcgtgaacgttggtgtaaccggcgttgtaagaaacgtgttcatcttccagaccagaccaggtcgggctggagataattttgcgcggctgtgcctgaatatcgaggaagcggatcttctcgtcttctttattcagcgccagatgcgtatggtcacgaccggtaaattcgctcagggcagcccaggctttcacggctacctgaccgttggtttccggtgccagtgtcaggatcatctctgccgcatcaattgcggtgttcagcatcggctggcctttcgccggaccttccgctttggtgtagttgagcttacgcagcagatccatctcgctctgggtgttccaggcaatccctttaccgccattaccgattttctccatcaacgggccaatagaggtaaagcgttcgtaagtcgccggataatcgcgctctacgaccataatgtgtggcgcggttttacctgggatcaggtcgcactcgccttttttccagtctttcacatccagcggctgcgccagttcagcggcagagtcatgctggataggcagcgtgacgatgtcggtttctttacccagatggccgacgcacacttcggagaatttcttcgcgatggctttgtagatttcccagtcgcttttcgcttcccaggccggatcgaccgccgcagacagcgggtgaataaacggatgcatatccgaagtattcatgtcgtctttttcgtaccaagtcgccgtcggcaaaatgatgtcggaatagagacaggtgctcgacagacggaagtccagcgtaaccaccagatccagcttgccttccagaccattgtcctgccagtccacttcttccggcttcacgccgccctgttgccccagatctttaccctggataccgtgctccgtccccagcaggtacttgagcataaactcatgacctttaccggaagaaccgagcaggttagaacgccagatgaacaggttgcgcgggtggtttttaccgttttctggttgttctgccgcaaaacggatggaaccctctttcagggatttcaccgtatagtccaccggattcatcccggctttttccgcttcgccagcgatagtcagcgggttagtgcctaactgcggtgcagacggcagccagcccatgcgttccgcacggacgttaaagtcgatcaagtgtccggtatagcgggatttgtccgccatcggtgacagcaactcttccgccgtgacggtttcataacgccactggctggagtggttatagaaataagaagtgctgttcatgtgacgcgccggacgctgccagtcaagggcaaacgccagcggctgccagccggtttgcggacgcagtttttcctgacctacatagtgcgcccagccgcccccgctctgaccgacacagccgcagaaaatcagcatgttgatcagaccacgatagttcatatcgaggtgataccagtggttcagccccgcaccgacgataatcatcgaacgaccgtgcgttttatcagcgttatcggcaaattcacgggcgatgcgaataatctggctgcgagaaacgccggtaatctgctcggcccaggccggggtataagctttcacatcgtcatagctggttgcacagttaacgtcgttcaggccacgttccagaccgtagtttgccagcgtcagatcataaacggtgctcaccagggcggtgctgccatcagccagttgcaggcgtttcaccggcagtttgtgcagcagcacgttttccagttccactttgttgaagtgttccgtgccgtcgccaccaaagtacgggaagcctacctcagcgatctcatcctggctacccagcaggctcagttgcagctcggtttcttcgccagttttgccgtcgcgctgctcaagattccatttgcccttctcgccccagcggaagccaatagaaccgttcggcgcaaccatttcgccattggtattaaaggcgacagttttccattccggattgttttcctggcccagcgcatcaaccagatcagcagcgcgcagcatacgacctgcagcgtagtaaccgtcgcgttcttccagcatcaccagcatcggcatgtcggtgtagcgacgcacatagtcggtgaaatactggcttgggttgtcgaggtggaattcacgcagcattacgtggcccatcgccagcgccattgccgcatcggtgccctgtttcggtgccagccacagatcgcacagtttggcgatttcagcgtagtctggtgtgacggcaacagttttggtgcctttgtaacgcacttcagtaaagaagtgagcatccggggtacgcgtctgcggcacgtttgaaccccaggcgatgatgtagctggagttataccagtcagcagattccggtacgtcagtttgctcgccccaggtttgcggagacgcaggaggcaggtcgcagtaccagtcgtagaagcttaagcaagtaccgccaatcagcgagagatagcgtgcacccgatgcgtaagaaaccatcgacattgccggaattggcgagaaaccagcaacacggtccgggccgtagtttttgatggtgtaaacgttagatgcggcgatcagttcgttcacctcctgccaggaagaacgaacaaatccaccgcgtccacgcgcctgcttaaagcttttcgctttatcggcgtcttcaatgatagaagcccatgcctcaaccggatcgctatgcagcgccttcgcttcacgccacattttcatcaggcgtttgcgcatcatcgggtatttcaggcggttggcactgtaaagataccaggagtagctggcaccgcgcgggcagccgcgaggttcatggtttggcagatccggacgggtacgcggatagtcagtctgctgggtttcccaggtgaccagaccgtttttgacgtagattttccagctgcaggagccggtgcagtttaccccgtgggtagagcggacgattttgtcatgctgccaacgctggcgatatccatcctcccagtcacggttggtattgagaagctggccatgcccatcggcaaaggtttcacccttctgtttgaagtagcgaaaccggtccaggaatttactcatcggttttctcctgtgggagcctgtcggccctctgataaatcgacattgctaatgtttaagggcaaggtaacgctctgaaacagcgtgggaattgataacgatcaagagtgatggggatgaaaaataaagtaaattcctaagatacccctttaggataattaacagccaccacataacagactgtaaattaagacgttttatacctgtagttatttaaactattaagatttttatgcagatgggtattaaggagtattccccatgggtaacatattaatggctcttaatgaaatccggcgaaataagccatataatatgagtatgttgtaactaaatgacgcataaaaaaagcgcgacatcatgccgcgcaaaggataatcaaatattaagatttattttttagaatgccgaccatataccgcccaggtaatcactacgcaggcgatatagaaaatcaaaaataccttcattgcgccgactggcgaacccgttaatgccagcgagctaccaaacgctttcgggataaagaagccaccaatagcgccaatcgcagagatgaaacccagcgccgctgccgtgtcggttgccgcttcacgcatcgcacgttcgtcagaacccccttctgctttcacgcgatccattgtcagtttacggaagatcactgaaatcatctggaaagtggaaccactacccagcccagctgtcaggaacagcgccaggaagaccgcgaagaacgccatgaagcttccgccctgcccgtcagtcggtaaggtcaggaacagcaggccgctgaaaatcgccatcagaataaagttcaccagcgtgacacgagttccgcccagacggtcagataatgcaccacctgcagaacgcgccagcgcaccaataaacggcccgaagaaagcgtattgcagaatctgaacatccgggaactgcgtttttgacagcatcgcaaagcccgcggagaagccgataaaggagccgaaggttgccagatacagcaggctcataatccacagatgaccccgtttgagtaccggcaactgctccttgatggaggctttcgaggtagcaagatcgttcatgccaaaccacgccgcaatggtgaagatggcaaggaacggcacccatatccaggacgcattcgccagatacagctcagtcccatccggctgtttgacgccctggctaccaaatactgcgaaaatcgacagtgataccaccagcggagcaaccaactgcatgacgctgacgcccatgtttcccagaccaccattcagacccagcgcgccaccctgcttctgtttcggaaagaagaagctgatgtttgccatactggatgcgaagttcgcgccagcaaagccgcatagcagagagatgatgatgaagacgctataaggcgtggaggtatcctgcacggcaaaacccagccagacgcaaggaataatcagaataccggtgctgaacgccgtccagcgacgaccaccgaagataggaaccataaaggagtatggaacacgtaataacgcgccagaaaccgaaggcagcgcagtcaacataaatagctgatcggtcgtaaaattaaaaccgactttcggtaagttcaccgcaacagcgctgaacaacatccatacgcaaaacgccagcagcagacagggaacggaaatccacaggttacggctggcaatacgttgaccgcgttgttgccagaacgcaggatcttccggtcgccaatctgtaatgacagctccagtagccctttcgggggcggatgagtgactcatagacacctctgatactcgtttcgatgtctgccaccttagtgtctgtagctaaaggcaatttgatgtaaatcaaacgataagataactttatctatcattgatatttatcattacccatagtgagtacagtgatttcataaaaattatgagatttttcacggtgctgtaaaatccctacccttaccgatgtaaagcgactaaccacacggcaaataaggagtaactctttccgggtatgggtatacttcagccaatagccgagaatactgccattccagaatgtatcgtcacattcattaaggttattgctcatttaaagcctgaaggaagaggtttgcatgcttaaacgttgtctctctccgctcaccctggttaatcaggttgcgcttattgtgttgctttctactgctattggactggcagggatggcggtttctggctggttggtgcaaggcgttcagggcagcgcccatgcgatcaacaaagcgggatcgctgcgcatgcaaagttaccgtctgttggcggcagtgccattaagtgagaaagacaagcccttaattaaagagatggaacaaacggcatttagcgccgagttaactcgagcagcagaacgagacgaacaactggcgcaattacagggtttacaagattactggcgtaatgaactgatccctgcactgatgcgtgcacaaaaccgcgaaacggtgtcagcggatgtcagccagtttgttgccgggcttgatcagctggtatctggttttgaccgcaccacggaaatgcgcattgagacagtggtactggtccatcgggtaatggcggtatttatggcacttttactggtgttcactattatctggttgcgggcgcgactgctacaaccgtggcggcaactgctggcaatggcgagtgccgtcagtcatcgcgattttacccaacgcgcgaacatcagcgggcgcaacgaaatggcgatgcttggaactgcattgaacaatatgtctgcagaactggccgaaagttatgccgtacttgagcagcgggttcaggagaaaaccgccgggctggagcataaaaatcagatcctctcttttttatggcaggctaaccgccgtttgcattcccgcgccccgctgtgtgaacgcctgtcacctgtactcaacggcttacagaatttaaccctgctacgtgatatcgaattgcgggtgtatgacactgatgatgaagagaatcatcaggagtttacctgccagccagatatgacttgtgatgataaaggctgccagctctgcccgcgcggcgtattacccgttggtgatcgcggcacgaccctgaagtggcggctggctgactctcatacgcagtacggtattttgctggcgaccctgccgcaggggcgtcatcttagccatgatcaacaacaactgctggataccctggttgaacaactcaccgccacgctggcgctggatcgccatcaggaacgtcagcaacagttgatcgtgatggaagagcgtgccaccattgcgcgcgaactgcatgattctattgcccaatctctctcttgcatgaagatgcaggtgagttgtttacagatgcagggcgatgcgctgccagaaagcagccgcgaactgttaagtcagatccgtaacgaactgaatgcatcctgggcgcagttgcgtgaattgctcaccacattccgcttgcagctcaccgagcctggattacgtccggcgctggaggcgagttgcgaagagtacagcgccaaatttggcttcccggtgaagctggattatcaattgccgcctcgcctggtgccttcgcatcaggcaatccacttgttgcaaattgcccgtgaggcattaagtaacgccctcaaacattcgcaagcgagtgaagtcgtggtgacggtggcgcaaaacgataatcaggtcaaactgaccgtccaggataacggctgcggcgtgcctgaaaatgccatccgcagcaatcactacggcatgataataatgcgcgaccgtgcgcaaagtttacgaggcgattgccgcgtccgccgtcgtgaatcaggtggcaccgaagtggtggtcacctttattcccgaaaaaactttcacagacgtccaaggagatacccatgagtaatcaggaaccggctactatcctgctgattgacgatcacccgatgctgcgaactggcgtaaaacagcttatcagtatggcaccagatatcaccgtggttggcgaagcgagtaatggcgaacagggtattgaactggcggaatctcttgatcccgatctgatcctgttagatctcaatatgcccggcatgaacggtctggaaacgctggataaactgcgcgaaaagtccctctcagggcgcattgtggtattcagcgtctctaaccatgaagaagatgtggtcaccgcactgaaacgcggcgcggatggttatctgttaaaagatatggaaccggaagatctgctgaaagcattgcatcaggcagctgctggcgaaatggtattaagcgaagcattaacgcctgttctggccgccagcttgcgcgctaaccgtgccactactgagcgcgatgttaaccagttaaccccacgcgagcgcgatattctcaagctgattgcccagggtttgccgaacaagatgattgcccgccgcctggatatcaccgaaagcacagtaaaagtgcacgtcaagcacatgctgaagaaaatgaagctcaagtctcgcgtggaagcagcggtatgggtgcatcaggagcgcattttctgattacggttcccagcgcagttcgtcgtttgacaatgcatcgaacggttcgacaagcgttagcgtgatctcattggaggagacacgctgcccctggttatcttccaccaccaccgacaatcgccagtgattgctcgccccttccccgttctgccagtcaggcatgatcagcgtccagccctccgcgctgttggcttgtgcgcccggcgtcaaacttaatatctgcgtatcgccctgccaaatcagttgccgaataccgtaacgactgcggatttgtaatttcagcggcactgtttcgccaggttttagatcccacggcggtgtcgccagaaacaccgttaacgtttttcgctgtcggtactcaagagtcggtagattatttcgctgcggattatcatagcgactaccacgtaacgactgactttcggcaacctcgcccgcagaaagttgttttttgagcggcacaccaaagcggtaattaagattcagtccgaggttattttgattttcgccactttcaccctgtttatgctgggccgtcacagtgactaatggcacaggggtgtaatttaatcccagactcaacgcgacgggattgtgataacccgtaccagagttaaacaaatcaacacgctcaccaaaatactgttctaccctgacactggtattgaggtgttgatagaacggcatgcgcatccgggctgtcaggtcatacccgcgcgccatccgttgttcctgcgtggctgtctgttcatgccatgcagcaaacggctgataaaagtttgccgatagtcgcaaatattcgccccacgcttcggcaccaaagcccgctcgctgaagattttcgtccagcaagttgtcataaaaagtgttataacccaccagccagttgccgcgcgcccagcgttgcccaacgcccacattgctcaccaacccatcatcctgctgagtaagaccaagctggctccaggtgagataacgatcattatcttgtaacggcacaaaccagcttccacgactgccggtgaaatgtccttcgttatccactttgacgtcaacactggcatttccccacggtgatagccaggactctacgtgctgattaacctgttgactaagcgcgtcgcggacttttcccaatgcgaaagcttttgcctgctcgccagtatccagcccgttatcattcatactggtttcgccgaaatctttcacaatttcagcaaagtgtttttccccatcatggttttcgggagccatgcctaaatccggcagaccatcattgttattatcaaagggatttgccgctttttgctcgaaggtagattgtgcgttagctgtaccgcctgccgccagcaagagtaaataaaacgggataatgcgaggaacgaaacggctcaaaacgtcggtaacttccggtaataatgaaaaaccatagccttaaagaataacgattactggcaacttttgtcgtattttctcgcgctttcaggaaaatccttaaaaaggtgaccgattggtcagacgctgcagaagcagtaagatagaagatgagtgtctaattccctgaatacaggagtaaataatgcaaaaaatcgtgatcgttgccaatggcgcaccttacgggagcgaatccttgtttaacagcttgcggctggccattgcgttacgagagcaggagagcaatctggatctgcgtctgttcctgatgtctgatgcggtcacagccgggttgcgcgggcaaaaaccaggggaaggctacaacattcagcaaatgctggagatccttaccgctcagaatgtaccggtgaaattgtgcaaaacctgtaccgacgggcgcgggattagcacacttcctcttattgatggggtggaaatcggtactcttgtggaactggcgcaatggacgctgtcagccgataaagtgctcacattttaatgtttgagggggcgtctgacgccccactatgagggaagtttactcaggcgaatcccggccgtaacacaccatccggataattctccgccagcagtttttttaccgataccagcaaatcattcagcccatcgtcctgcattcccagtttgataagctcctgttccagtgaaaacaggtattgtgcgttggttcccagcggaccgctcgccgccgcaatcaacggcgcgatgacctgagcgcgagtgtcagattcatattctggatgtcgcgggtccataataaacacaatggcgtttactgtgcgtccatcatcaagatcaagctgacaccaggttggcagataacagccggtaatcatctcgcgcttccacaacagggttagttcctgctccagcgtctcttctggtagtcgataggcgacgcctgtggtgcgtccgccctctttcagtgcaagcatccgtcccggctggtgcgcagtcccgcgcccggcggtcaggcgcaggcaaaacgcgcgatgccatccaaccagtgtaccggtgcataattcggtaaactccagtgccggattccacatcaacgatccataaccgaagatccacaccggtccctcattaggtcgacaagccagcgtcgccgccagcgaagccgcccgttgttctgctgaccataagagtgattcttcaatggcaccaaatgccgttttacaatcggcattcatcaagaaatcacgcgttatcaccttacacctccgccactgcatacttccctgcgacaactttttggtgtcttccggacatttttaccgctcattttgaaaccactaacgggacaatatgcaatccacggaccacttgcaaggcaacaccgcacgaatagctttaactaagctaccggttttacgattttttatgccatttatcatcatcccctttggcatattcatgcttcacagcagcccaggccactttatgcgcggtttcttcgcgactggcgtcatcacgccgatcttctttatctttatattgatcccatgcgctgttgaacgcttctttatagatatcctgggcatgagacggtagaacgtgctttacgctttccggcagatcgcttttcgttttatacggcatcgttgactccttttacaaagttgaacattaagtgtggtcaacaatatctactcttgccaaaacataagaattttcatgtcagactgttcttaagaaacgctaaaacaaacattgtctaaacgtaatacttatttttatgccccaatgagtaaaaaatcgacagcggggtaaaaattcgtaaaatgttaccgatatccagacactttctgttatttttcctacctattttttacattttcgataaattcatctgcaaagggataaccataatgtcaaatgctcaagaggcggtaaaaacccgccacaaggagacttcgcttattttcccggttctggcgctggtagtgctgttcctgtggggaagcagccagacactaccagtggtcattgccatcaatcttcttgcgcttattggtattttaagtagcgcctttagtgttgtccgtcatgcggacgtattagcccatcgcctgggagaaccttacggttcgcttattcttagcctttcagtggttattcttgaagtcagtttgatttcagctttaatggcaaccggcgacgccgcgccaacgctaatgcgtgatacgctctattcaatcattatgattgttaccggtgggctggttggcttttcattattgttgggcggtcgtaagtttgccacccaatatatgaatctgtttggtatcaagcagtatttaattgcgctgttccccctggcgataatcgtactggtatttccaatggctctgcctgcggcgaatttttcaaccggtcaggcgttactggtagcattaatttctgcggcaatgtatggcgtatttttgctgatccagaccaaaacgcatcaaagtttgtttgtctacgagcacgaagatgacagtgatgacgacgacccgcaccacggtaaaccgtctgcccatagcagcgtgtggcatgctatctggttgattatccatctgattgccgttattgcagtcaccaaaatgaatgccagcccgctggagacattgctcgacagcatgaatgcccctgtcgcctttactggcttcctggtggctctgttgattctgtcgccggaaggtttaggtgcgttaaaagcagtgttgaacaaccaggtccagcgcgcgatgaatctgttctttggttcagtgttagcaaccatttcgcttaccgtacctgtcgtcacgctaattgcctttatgacgggtaacgaattacagtttgcacttggtgcgccagaaatggtggtgatggtggcctctttagtgctgtgccatatctccttctccaccggacgtactaacgtgctcaatggcgcagcgcatctggcactgtttgccgcctatttgatgacgatatttgcctgacagttatatctcctccgatgacggaaatcgggggagataagataaattcctgcttattgtatttcttcatactacctggacagctcgttaatcagaattgcgagcctgtaccacaacctgcacgaaaccactgcaacagctgttgaaaagccggaatgtactctttattgcaaacatttcagggatgaagtgaagatgaattgagacgtagtatccacaccaagccggaattatccggtgaggcgcaatgttgcgggggctttatccctggtggcattggttgctggaaagagaaaacccccgcacgttgagaggtaaaacctgacaacaaaacgggggctaatcttgaaaccagacacttcaagaatagccgccttgttgtcattacaacaaggcggctatatgacgctcgcgcagtttgccatgactttctggcacgacctggcagcaccgatcctggcggggattattaccgcagcgattgtcagctggtggcgtaaccggaagtaaggtgaaaacgggcgtcaggctgccgtgatggcaatatgcgcccgaaaccggccgcaggggtaacagcctgcggccatttttgtctttatctcttccacaagtaaatattggcaacccgagctggaagcatcatccagagcactcatgaaacgactgtaacagctgttgaaaaaccggaatgcactcttcattgcaaacatttcagggatgaagtgaagatgaattgagtcgtagtatccacaccaagccggcgttatccggtgaggcgcaatgttgcgggggcttaatccctagtggcattggttgctggaaagagaaaacccccgcacgttgagaggtaaaacctgacaacagaacgggggctaatcttgaaccatcaacaattcaagaatagccgcaaaatgttgtcattacaacaaggcggctatatgacgctcgcgaagtttgccatgattttctggcacgacctggcagcaccgatcctggcggggattattaccgcagcgattgtcggctggtggcgtaaccggaagtaaggtgaaaacgggcgtcaggctgccgtgatggcaatatgcgcccgaaaccggccgcaggggtaacagcctgcggccatttttgtctttatctcctccacaagtaaatattggcaacccgagctggaagcatcatccagagcactcatgaaacgactgtaacagctgttgaaaaaccggaatgcactcttcattgcaaacatttcagggatgaagtgaagatgaattgagacgtagtatccacatcaagccggcgttatccggtgaggcgcaatgttgcgggggctttatccctggtggcattggttgctggaaagagaaaacccccgcacgttgagaggtttaacctgacaacagaacgggggctaatcttgaaccagaacaattcaagaatagccgcaaaatgttgtcattacaacaaggcggctatatgacgctcgcgcagtttgccatgattttctggcacgacctggcagcaccgatcctggcgggaattattaccgcagcgattgtcggctggtggcgtaaccggaagtaaggtgaaaacgggcgtcaggctgccgtgatggcaatatgcgcccgaaaccggccgcaggggtaacagcctgcggccttttttgtatctggcacccatgaaaaaagtcttaacgcagaacgctaagactttatttttcaagcaaaaaagattacttgctggtatccagttcttcgaaacctttcaccagatcatcaatcgctttcatctgcttgaggaacggttccagtttagccagcggcagcgcggatggaccatcacatttcgcatgttccggatccggatgcgcttcaataaacagccccgccagacctaccgccataccggctcgtgccagctcagccacctgagcacgacgaccaccggaagctgcgccaaacggatcgcggcattgcagtgcgtgggtcacgtcgaaaatcaccggcgagttaccagacactttcttcataatgctgaagcccagcatatcgacaaccaggttgtcatagccgaagttagcaccgcgatcgcaaagaatcactttttcgttgccgccttctttgaatttatcaacgatattacccatctgtcccgggctgacaaactgtggtttcttgacgttaattaccgcaccggttttcgccatggcttcaaccaggtcagtctggcgagcaagaaacgccggcaactgaatcacatccacgacatcagcaacgggctgtgcctgacttggttcgtgaacgtcggtgataattttcacgccaaaagtctgcttcaactcctggaagattttcatcccttcttccaggcccggtccacgataagagtggatggaggagcggttggctttgtcaaaagaggctttgaacacgtaagggatacccagtttctgggtcacggttacgtagtgctcgcaaatgcgcatcgccagatcgcgagattccagcacgttcataccaccaaacagtacgaacgacaggtcatttgctacgttgatgtcgccaatgctaaccactttttgtttcataggatcgccttaatcttgagtaaaatgtcgattaattaatgcagcacaatatgtttatgcgcgatgttatttatttgcgcacggatcatttcgctgatcgggtcttccggacactgttcaacgaaataacttaaatcgttcaacgcaacgtgttcgcaatccagttgcgcataaatcaacccgcgatcgcgaatttcatagggatcttccgggttgaattgtaataaagcttcgctggtgcgtaacgccagctccatctgattttcttccatcaacgaggctttgagtgtatccaacaatttgcggattacctcaatgttatcagcttcatcaaggtcttcataaaacagttccgccgacgggctgatatttccctttaaccatacgtccagcatatgttcgcttaacgattcaccgttaaaaggattaatcagccaaatttcgccatccggacattcaatgcgcaatatcagctgcgtagggaaaatcaccggcagcagcggcaaatcgagacgattcgcgacccataataaaaccgcacctaatgataccgcactgccctgtcgattctttaacacctggtccagccataatgcatcggaaagacgataaacgccgcgtgaggctttaaatccccagtcgccgtaaaacagcgcgatcagtttttccagctgctcttctaaaggcagaagctggctgatttcttccttcgccagactaacgagacgctccagttcgtcgtaaacatcttgcgagggaaaatcgcggcggattgcttcgcaagccaggatcatgccttcgcacaatggcgctttattaaattcgaaatcagctaacgatctcatgacttaccccagtaacggtacttttgtggtggcgagtttaatgatgatgtacagcaccaccaacgccagcgggaaggcaataatgcgcgcctgctgactgtgcatacgacgataatcgagtgcaataaaacccaaaacgatataaatgataactccaaacagcttttcagtcagccactgtgcctgcccggaaaatggcaggatgtgcgctttagccatcaacgcaatgccgcttaacaataacaccgtatcgacaaccggcggcacaatgcgcgtccagcgagcaaatgcctgtggatgcttctgataacgtagccagaaacgtaaggttaatagcccaacagaaagcgcgatactaataagatgaacactaagcagtgtagaaaaacttgtcattgataatagcggccgagcgttacgcgctcgttatcaccatagtcacggcaggtttcgacgtcatgataccccgcgaggataaatgcttgtcgcaccgcttcgccctgctgccagccatgttccagaagcagaaagccgccggataccagcgcgttacgcgactgttcgatgatatgcacgatgtctgccattccactgtctgccgcaaccagcgcagtgagcggctcaaagcggacatcgccttgttgaagatgtgggtcctgctcgtcaatatacggcggattgctgacaatcatcgcaaactgctgcccggctagcgcgctaaaccagtcgctttgcagaatgtggatatttttgatcgccagatgctgggcattacgttgtgccagggagacagcatcaggcatacgatctacagcgataatttcgcagtccgggcgctcgctagccagcgcaagcgcaatcgccccggtacccgtcccgagatcgagaatacggcaaggttgttcaggcaaccgcgccagtgcctgctccaccagacactccgtatccgggcgcggaattaaggtcgctggcgaaacaaataacggcaacgaccagaattctcgcaccccggttaaatgagcaatgggttcaccatcgcgacgacgtgtcagtagcgcatcaagttgctgacattgttcgtcagtcagctgcgtttcaccaaaggccagaataaaagtccgccccctgccagtgacatactccaataagatttcagcgtcacggcgtgggctttcgctcgcctgaagttggcttattgcttcacgtaaccagtattgatattccattattcctgctcggacaacgccgccagttggtcggcctgatgttcctggataatcggttcaatcagcatatccagcttaccttccatcacttcatccagacggtagagcgtcaggttgatgcggtgatcggtaacgcgcccctgcgggaagttgtaagtacggttacggtcgctgcgatcgccactccccagcaggttacgacgggtagacgcttcggcctgttgccgttttgccatttctgcagcgtggatacgagcaccaagtacagaaagtgctttagctttgtttttatgttgtgaacgttcgtcctgacattcaacaacaatcccggtcggcaagtgagtaatacgaattgccgaatcggtggtgttaacgtgctgaccacccgcccctgacgagcggaaagtatcaatgcgtaaatctgctgggttgatgtccggcagttctgcgtcaggcagttctggcattaccgcaacggtacaagcagaagtatgaatacgaccctgcgattccgtagcaggaacacgctgcacgcgatgaccgccggattcaaatttcagacgaccatacacaccatcaccgctaattttggcgatgatctctttataaccaccatgttcaccctcgctggcgctcatgatttctacccgccagcggcgggcttcggcataacggctgtacatacggaacagatcgcccgcgaacagcgccgcttcgtcgccgccggttccggctcggacttcgaggaaggcgttacgttcgtcatcaggatcttttggcagtaacagaacctgtaattgctgttccagttgctcgcttttttctttagcttcgcgcagttcatcctgcgccatctcacgcatttcaggatcatcgagcatcatctgtgcggtttcgatatcttcctgaacctgttgccagtcggtaaaacagcgcgaaacatcacttaactgcgcatattcgcgtgataatgcgcgaaaacgttcctggtcggcgatagtttgcgcgtcacccagcaacgcctgaacttcttcatggcgttcatgcagggcttccagtttggcaacgatagaaggcttcataggcgtaaatgcaccctgtaaaaaaagaaaatgatgtactgctactccagcccgaggctgtcgcgcagaatattcaggcgttcgttatccccgtcacgggcggcctgttgaagtgatttcgttggcgcatggatcaagcggttagtcagtttccatgccagatcctgcataatggcttgcgcgtcgccgccctgctcaagggccgctaacgctttggcggttaactcatcgcgaacgtgctctgcctggctgcgatactcgcgaatggtttcgctggcgctttgtgctcgcagccacgccataaattcgctggtttcctgagcgacaatagtttccgcctcaaccgctgcggctttacgctgcgccaggttgtgcgaaatgatgctttgcagatcgtccacactataaagataagcattcgccagtttgccaacttccggctcaacatcgcgcggaacggcaatatccaccaacagcattggttggttacgacgactttttaatgcgcgctccaccatgcctttcccgataatcggtaacgggctggcggtggaactgatgatgatatcggcttcgcgcagacgttcgtcgatctcactcagggcaatcacttccgcgccaacttcatctgccagaatttgggcacgttcgcgagtgcggttggcgataatcatcttctgtactttatgttcgcgcagatgacgcgctaccagctcgatggtttcgcccgcgcctaccagcaacactgtgaccgtagagagcgattcaaagatctgccgcgccagcgtacaagccgcaaaagcgacagacacagcactggcaccgatatctgtttcagtgcgaacgcgtttcgctacagagaaagatttctggaacatgcgttccagttcgctggccttcatatgacctttttgcgaatcggcaaacgcttttttaacctgaccgaggatctgcggctccccaagaaccagtgaatccaggccgctggcaacacgcattaaatggctaaccgcgtcgttatcctgatgccagtagaggcttttacgcagatcttcttcattaagattgtgataatcgcaaagccagcggattaacgcctcttgcaggttatcctgctcttcaacgctaagataaagttccgtgcggttgcacgtcgacagcaccacgccgccctgcaccatcggctgcgcaagcaggctgtcaagcgcctgatcgagcttatccggcgaaaacgatacacgttctcgcagcgatacaggtgccgttttatggttgataccgagtgctaaaagggtcatgtctgcgggaaataataccaacgttgatatggttagtctgcttgcatcatacaggatgcgtaagatcaataaaagagagcgcccccttttggagtaattgccgaaagccgttagattctggcaattaagacaacttgaacatagacgatagcggacggtaacgctagcattaagggttataactgcaacgtatctcaaggacttgtcatcactatgcccctgcccgattttcgtcttatccgcctgctaccgctggctgctcttgtgctcactgcctgttccgttaccacgcccaaaggtcctggcaaaagcccggattcgccacaatggcgtcagcatcagcaagacgtgcgcaatcttaatcagtatcagactcgcggcgcgttcgcttatatttctgaccaacaaaaagtgtacgcccgctttttctggcagcaaaccggccaggatcgctaccgtctgctgctcactaacccattgggcagcacggaactggagctgaatgctcaaccgggtaacgtgcagttagtcgacaataaaggtcagcgttataccgccgatgacgccgaagagatgattggcaaattgaccggaatgccaattccgctcaacagcttgcgccaatggattttaggtttaccgggtgatgcaaccgactacaaactggacgaccagtaccgcctgagcgaaattacctacagccagaatggcaaaaactggaaggttgtttatggtggttatgacaccaaaacgcaacctgcgatgccagccaatatggaactcaccgacggtggtcaacgcatcaagttaaaaatggataactggatagtgaaataatgcggacacagtggccctctccggcaaaacttaatctgtttttatacattaccggtcagcgtgcggatggttaccacacgctgcaaacgctgtttcagtttcttgattacggcgacaccatcagcattgagcttcgtgacgatggggatattcgtctgttaacgcccgttgaaggcgtggaacatgaagataacctgatcgttcgcgcagcgcggttgttgatgaaaactgcggcagacagcgggcgtcttccgacgggaagcggtgcgaatatcagcattgacaagcgtttgccgatgggcggcggtctcggcggtggttcatccaatgccgcgacggtcctggtggcattaaatcatctctggcaatgcgggctaagcatggatgagctggcggaaatggggctgacgctgggcgcagatgttcctgtctttgttcgggggcatgccgcgtttgccgaaggcgttggtgaaatactaacgccggtggatccgccagagaagtggtatctggtggcgcaccctggtgtaagtattccgacaccagtgatttttaaagatcctgaactcccgcgcaatacgccaaaaaggtcaatagaaacgttgctaaaatgtgaattcagcaatgattgcgaggttatcgcaagaaaacgttttcgcgaggttgatgcggtgctttcctggctgttagaatacgccccgtcgcgcctgactgggacaggggcctgtgtctttgctgaatttgatacagagtctgaagcccgccaggtgctagagcaagccccggaatggctcaatggctttgtggcgaaaggtgttaatctttccccattgcacagagccatgctttaagccgggcaagctgagtttcggtgacaacgtcaccttgttccagacgttgcatcgcgctctttaatacaccgcctggaaaggatcatgcctggcccgcacagttttcggcagattctttccaccaatggacgcatgcctgaggttcttctcgtgcctgatatgaagctttttgctggtaacgccaccccggaactagcacaacgtattgccaaccgcctgtacacttcactcggcgacgccgctgtaggtcgctttagcgacggcgaagtcagtgtacaaatcaacgaaaatgtacgcggtggtgatattttcatcatccagtccacttgtgcccctactaacgacaacctgatggaattagtcgttatggttgatgccctgcgtcgtgcttccgcaggtcgtatcaccgctgttatcccctactttggctatgcgcgccaggaccgtcgcgtccgttccgctcgtgtaccaatcactgcgaaagtggttgcagacttcctctccagcgtcggtgttgaccgtgtgctgacagtggatctgcacgctgaacagattcagggtttcttcgacgttccggttgataacgtatttggtagcccgatcctgctggaagacatgctgcagctgaatctggataacccaattgtggtttctccggacatcggcggcgttgtgcgtgcccgcgctatcgctaagctgctgaacgataccgatatggcaatcatcgacaaacgtcgtccgcgtgcgaacgtttcccaggtgatgcatatcatcggtgacgttgcaggtcgtgactgcgtactggtcgatgatatgatcgacactggcggtacgctgtgtaaagctgctgaagctctgaaagaacgtggtgctaaacgtgtatttgcgtacgcgactcacccgatcttctctggcaacgcggcgaacaacctgcgtaactctgtaattgatgaagtcgttgtctgcgataccattccgctgagcgatgaaatcaaatcactgccgaacgtgcgtactctgaccctgtcaggtatgctggccgaagcgattcgtcgtatcagcaacgaagaatcgatctctgccatgttcgaacactaatcgaacccgctcaaagacccgctgcggcgggtttttttgtctgtaatatccatttgtatgacctatgcctccttcacctgccatttagttgacagatgatgcgctcacggatgaaacattattgtgaacaaaatattttcctcacatgtgatgcctttccgcgctctgatcgacgcttgctggaaagaaaaatatactgccgcacggtttacccgtgacctgattgccgggataaccgtcgggattattgctatcccgctggcgatggcgttggctattggtagtggtgtggcaccccagtacggtttatataccgcagctgttgcggggattgtcattgctctgacgggtgggtcacgctttagcgtttccggtccgactgcggcatttgtggtaattctctatcccgtgtcgcaacagtttggactggcaggactgctggttgcgaccttgctgtcggggatctttttgattctgatgggtctggcacgctttggtcgcctgattgagtatattccggtttccgtcaccttaggtttcacctcgggtatcgggatcaccatcggtaccatgcagattaaagattttctcggtctgcaaatggcccatgtcccggaacattatctacaaaaagtcggcgcattatttatggcgctgccgaccattaatgtgggtgatgctgccattggcattgtgacgctaggtattcttgttttttggccgcgtctgggcattcgtttacccggtcaccttccggccttgctggctggttgcgcggtgatggggattgttaacctgctcggcggacatgttgctaccatcggttcgcaattccactacgtcctggccgatggttctcagggtaacggtattccgcaactgctgccgcaactggtgctgccgtgggatctgcctaattcagaattcacgctaacctgggattctattcgcacactgctgcctgcggcattctcaatggcaatgctcggcgcaatcgaatctctgctctgcgccgtggtactggatggtatgaccgggacgaaacacaaggcgaacagcgaactggttggacagggactggggaatattatcgctccgttctttggtggtattaccgctacagctgccatcgcgcgttctgccgctaacgtccgtgccggggcaacttcccctatctcggcggtgatccactctattctggttattcttgccctgctggtactggcaccgctgctctcctggctgccgctttccgctatggcagccctgctgttgatggtggcgtggaacatgagtgaagcgcataaagtggtcgacttgctgcgtcatgcaccgaaagatgacatcattgtcatgctgctgtgcatgtcgctgaccgtgctgtttgatatggttattgccatcagcgtggggatcgtgctggcatcgctgctgtttatgcgtcgtatcgcacgtatgactcgcctggcaccggtagtcgtagatgttccagacgatgttctggtactgcgcgttattggcccgctgttttttgctgctgctgaaggcttgttcacggacctggagtcacgtcttgaaggcaaacggattgtgattctgaagtgggatgccgttccggtacttgatgctggtggtcttgatgcgttccagcgttttgtgaagcgtctgcccgaaggatgtgaactgcgcgtgtgcaacgtggaattccagccactgcgcactatggctcgcgcaggcattcaaccgatcccgggacgcctcgcgttcttcccgaatcgtcgcgcggcgatggcggatttataagtacgagattgaccagtcagcgcaaactgactggtcagcaaactgcattatttgttagctatgacggcgattatcgctacggcggcaacgtttgtcatagtgacgaacccaccagtaacggtcgcacacctgttcatgcccgccaacacgggcacccgccagccagagaatggcaccgacgaaaatacttagcactgcaccatgtgcgaaatactggggcatattaaactgtggtaactggttgaggattgaataccccacgccgaccaccattaccaccagccccaaccccatgagcacgttaccgagtaacgaagcgtttttgcgtttcatatgtcacctccggaactttctgggttgtaacagggaatacccctcttccttatgtgtaaagtatagacaacaccctgtgggttatgtgcgggcgtgatcacaattacaacccttatttcaacaaaactttacaaataaacgcctgaacaccttgactttctaatagtccactcaggcaattattacgttatctgcatttgatacgcagttttttgtcaagcggggccgcaaccagtaaactacgcgccagttatgtacacactcaggacaaaaaacgtgacgattaaattgattgtcggcctggcgaaccccggtgctgaatacgccgcaacgcgacataatgctggtgcctggttcgttgacttactggcagagcgtttgcgcgctccgctgcgcgaagaggctaaattctttggttatacttcgcgagtcactcttggaggcgaagatgtccgcctgttagtcccgactacatttatgaatctcagcggcaaagccgttgcggcgatggccagttttttccgcattaatccggacgaaattctggtggcccacgacgaactggatctgcctcctggcgtcgccaaatttaaattgggcggtggccatggtggtcacaatggactgaaagacatcatcagtaaattgggtaataaccctaactttcaccgtttacgcatcggaatcggtcatcctggcgataaaaataaagttgtcggttttgtgttaggcaaaccgcctgttagtgaacagaagttaattgatgaagccatcgacgaagcggcgcgttgtactgaaatgtggtttacagatggcttgaccaaagcaacgaaccgattgcacgcctttaaagcgcaataagtcgttgtctgcggcatttttgccgagtgccgtgtataataggcaaagttatttccatttctgcaatctgttagcaataacagattgattattaagatattaaggtgatttaaatcatgggattcaaatgcggtatcgtcggtttgcccaacgtcgggaaatctaccctgttcaacgcgctgaccaaagccggtattgaagcggccaactttccattctgcaccattgagccgaacacaggcgtcgtaccaatgcctgaccctcgcctggatcaactggctgaaatcgtaaaaccgcaacgtacgcttcccacgaccatggaatttgtcgatatcgccggtctggtaaaaggcgcatcgaaaggcgaaggtctgggtaaccagttcctgaccaacatccgtgaaaccgaagcgatcggtcacgttgttcgctgctttgaaaatgacaacatcattcacgtttccggcaaagttaacccggctgacgatattgaagttatcaacaccgaactggcgctggcagacctcgacacctgcgaacgtgcgattcatcgcgtacagaagaaagccaaaggtggcgataaagacgcgaaagctgagctggcggtcctagaaaaatgcctgccccagctggaaaacgcaggtatgctgcgcgcgctggatttaagcgctgaagagaaagcggctattcgttacctgagcttcctgacgctgaaaccaacaatgtacatcgccaacgtcaacgaagacggttttgaaaacaacccatatcttgaccaggtgcgtgaaatcgcggcgaaagaaggttctgttgtggttccggtttgtgctgctgttgaagcagacattgccgaactggacgacgaagaacgtgacgagtttatgcaggagcttgggctggaagaaccgggcctgaaccgtgtgatccgtgtcggttataagctgctgaacctgcaaacttacttcaccgctggggtgaaagaagtgcgtgcatggaccattccggttggagcaaccgcgccgcaggcagcgggcaaaatccatactgattttgaaaaaggctttatccgtgcacaaaccatctcgtttgaagatttcatcacttacaaaggtgaacaaggcgcgaaagaagcaggcaaaatgcgtgcagaaggtaaagattacatcgttaaagatggcgatgtgatgaacttccttttcaacgtctaattaatttattgtctcatgaggtttcgctaaatctcatgaagagcgcaaaagtatataaaatccacgcaattgcgtggatttttcatttcaccgagtcctaatcattcttgtaacatcctacacttttgtgcttattgcctacagtgaaccacgagaataattaaagacatcagtgtcagatgacggatatctcattagtagtgatataacgtaagtttttgttcaactacacatcacccccttcacagctgatcaatattgatcacgctccaatatgctggcgagaaaaggacttacctgaagggtaatatcccgcagataaagtccccgaataacgtgattacgtgcgatcctggcaagatgaaaatgataaccagtagcacaataacaacgataggccagaaaacccattgaccaaaaatgaatatcgatgttttttgctttttcttattagtaatgcaaaaatggcgcatattgtttttgttatgcagatacatcaagcgaaattcccataactaattaggattattacaaaaaatcttcaccaaattttttaaccgctgtttgttgtaatatttttgccatatttatagtaacgaattggaataagtaacgacaacttagggaataactcgatataaactcacctttgtaagggggatgttaaatatatattaattcctgtgttcctgattttgcccggtaatagagaattattctctgagaagctcatcatgattgcaccatacaaatatcatgatgataagaggatattattcattgatttaaacaaaatgacaaaatccatagacccatagtctgggtactatataggagtggtatgggcatcaaacaacacaatgggaataccaaagcagatcgtctcgctgaattaaaaatcggtgatgctgccaacttactgatttagtgtatgatggtgtttttgaggtgctccagtggcttctgtttctatcagctgtccctcctgttcagctactgacggggtggtgcgtaacggcaaaagcactgccggacatcagcgctatctctgctctcactgccgtaaaacatggcaactgcagttcacttacaccgcttctcaacccggtacgcaccagaaaatcattgatatggccatgaatggcgttggatgccgggcaactgcacgcattatgggcgttggcctcaacacgattttacgtcacttaaaaaactcaggccgcagtcggtaacctcgcgcatacagccgggcagtgacgtcatcgtctgcgcggaaatggacgaacagtggggctatgtcggggctaaatcgcgccagcgctggctgttttacgcgtatgacagtctccggaagacggttgttgcgcacgtattcggtgaacgcactatggcgacgctggggcgtcttatgagcctgctgtcaccctttgacgtggtgatatggatgacggatggctggccgctgtatgaatcccgcctgaagggaaagctgcacgtaatcagcaagcgatatacgcagcgaattgagcggcataacctgaatctgaggcagcacctggcacggctgggacggaagtcgctgtcgttctcaaaatcggtggagctgcatgacaaagtcatcgggcattatctgaacataaaacactatcaataagttggagtcattacccgaagtgctatattgatttttttcacccgtaaagcaggtgtcgaatatacgttctgatgtgaaaagcggatagcggcatctgtatcgctatccgccttatgaaaatcttattctcttcgcagcaggcggaatacgcccagaacgagaatagctccctgaggtgtactggcaatagcggacactaccatttgttctttttttaagcagccatctgatgatatttttccctgaaggctgccggggagatattccccagacgagagtgacgacgctgacgattgtagaaaatctcaatgtattcccgtattactgagatggcttcatcccggttattaaaacgatagtggctcaggctctcatttttcagcgttccccagaagctttccatcggagcgttgtcgtaacagttacctttacgcgacattgatgttttcagaccagactgctcctgtatgacccggtaatcgtatgcgcagtactgtgaacctcgatcagagtggtggattagcccggcaggtgggcgctggctcctgagcgccataaacagggctttacctgtcagctcttttgtcatgcgctctcccatggcgtagccgacaatttcgcacgtataaacatctttgatgccagcgaggtacaaccatccctcctgtgtggcaacatacgtcaggtccgccacccagacctgatttggtgctgtaggagcgaacgtctggttcagcagatttggcgcaactggcagattgtggttcgagttcgtagtcgctctgaacttgcgtttctgcttacagcgtagccttagctccttacgaagacgtgccagtcggtcacgaccaacgatgatgccattctctgccagctccgtctggagccgccgggttccatatgtttcgcgagtgcggatatgtgccaccttaatctccagttttagccgctcatcactttgttttctgtctgagggttcatgctgtacccagttgtaataaccgctcctggatacaccaaatacctgacacatcgcttcaatgggaaattgttgtcgccattgttcgattaacgcgtatttttcagcgactcctgtgcaaaatacgctgttgctttttttaatatatctcgctcaaggcgagcttcatttaacgccttacgcagttgcagaatttcagattccagttcagccaccgtgcgggaaccaggagtaccgagcccttttctggcggcggtaacccattgtcctaaagtgccttcaggaagagataatcgggaagcgccttcactgatcgaaagttgattttcaggaaccgttctgacagcttcggctttgaactctttagagtaacgttgggtttttctgctcattattagctccttctgatgccattctatttcaggaaggagtgtccgttaaactcaggctacctcaaaatataaagaagtagacccaggtgctgaagcacaagataaaaataatggtgcacttctcggagacagcgttgtacgtacaattcaaagcggcatccgcgcacaatttgcaaacggtgccagcgacagtgccttcaaaacattaaacgagatcgggattaagcaggacggcacgacgggtaagctgaaaattgatgatgataaactcaaaaaagtcctgaatgaaaatacagcatccgtacgtgaattgctggtaggcgatggtaaagaaacaggaattaccaccaaaattgccaccgaggtaaaaggttaccttgccgatgatggcattattgatagcgcacaggacagtattaacgccacactgaaaaaactgaccaaacagtatctatccgtcagtgccagcattgatgacaccgtggcgcgttacactgcacagtttacgcaattagataccatgatgagcaaactgaataacaccagtacctatctcagccaacaatttactgcaatgagtaattcctgatcacggaggtcagcatgtataccgcgagcggctcaaaagcctatgcacaaattggcgtcgaaagcgccgtaatgagcgccagccagcaacagctggtcaccatgctatttgatggagtgctgagcgcactggttagagcgcgcctgtttatgcaggacaacaatcagcaaggcaaaggcgtctctttgtcaaaagcgatcaacatcattgagaacgggctgcgggtgagtcttgatgaagagagcaaagacgaactaacccaaaacttgattgctctttatagctatatggtcaggcgcttgctgcaagccaatttacgcaacgatgtctccgcagtcgaagaagtggaagcattaatgcgcaatattgccgatgcctggaaagagtctttactctccccttctttgattcaggacccagtctgatgaaccatgcaccgcatttgtatttcgcctggcaacaactcgtcgataaaagccagctcatgttacgcctggcaacggaagaacaatgggacgaactcatcgccagcgaaatggcgtatgtgaatgcggtgcaggagattgcacatctgactgaagaggttgccccgtccaccacgatgcaggagcagctccgcccgatgctgcgcctgattctcgacaacgaaagcaaggtaaagcagttattacagattcgtatggatgaactggcgaaactggtcggtcagtcatcggtgcaaaaatcagtgttaagtgcctatggagatcagggcggctttgtgctggctccgcaggataacctcttttgaatcttaacgagccgatggctcgcgaataatccgattacggctacgcttctaatgttccccttgaatggagtcgaagaatgcgtaatcccacgctgttacaatgttttcactggtattacccggaaggcggtaagctctggcctgaactggccgagcgcgccgacggttttaatgatattggtatcaatatggtctggttgccgcccgcctataaaggcgcatcgggcgggtattcggtcggctacgactcctatgatttatttgatttaggtgagtttgatcagaaaggcagcatccctactaaatatggcgataaagcacaactgctggccgccattgacgctctgaaacgtaatgacattgcggtgctactggacgtggtagtcaaccacaaaatgggggcggatgaaaaagaagctattcgcgtgcagcgtgtaaatgctgatgaccgtacgcaaattgatgaagaaatcattgagtgcgaaggctggacgcgttacaccttccccgcccgtgccgggcaatactcgcagtttatctgggacttcaaatgttttagcggtatcgaccatatcgaaaatcctgatgaagatggcatatttaaaattgttaacgactacaccggcgaaggctggaacgatcaggttgatgatgaactcggtaatttcgattatctgatgggtgagaatatcgatttccgcaatcatgccgtgacggaagagattaaatactgggcgcgctgggtgatggaacaaacacaatgcgacggttttcgtcttgatgcggttaaacatattccggcgtggttttataaagagtggatcgaacacgtacaggaagttgcgccaaagccgctgtttattgtggcagagtactggtcgcatgaagtcgataaactgcaaacgtatattgatcaggtggaaggcaaaaccatgctgttcgatgcgccgctgcagatgaaattccatgaagcatcgcgcatgggacgcgactacgacatgacgcagattttcacgggtacattagtggaagccgatcctttccacgccgtaaccctcgtagccaatcacgacacccaaccgttgcaagccctcgaagcgccggtcgaaccgtggtttaaaccgctggcgtatgctctaattttgttgcgggaaaatggcgttccttcggtgttctatccggacctctacggtgcgcattacgaagatgtcggtggtgacgggcaaacctatccgatagatatgccaataatcgaacagcttgatgagttaattctcgcccgtcagcgtttcgcccacggtgtacagacgttatttttcgaccatccgaactgcattgcctttagccgcagtggcactgacgaatatcccggctgcgtggtggtcatgtcgaacggggatgatggcgaaaaaaccattcatctgggagagaattacggcaataaaacctggcgtgattttctggggaatcggcaagagagcgtagtgaccgacgaaaacggcgaagcgaccttcttttgcaacggcggcagcgtcagcgtgtgggttatcgaagaggtgatttaaattcatccccggcggcaagccggggagatttcattacggcagtggcgtcggtaacggcgctttatccagcgcggcggcacactctgccgtcgggcgatccacacgctccatcgtcataccatcgtactcaatggtgttaccgtcacgctcaacctcgtacagctcacgttttacggtaacgttagtgagatcatcagacatcaatgtcaacttgcccggcacggcaatcacccgctgccactgacggcaatccagggtatcgccctctttagtgacaatcaggctgcctatcgcttccggactgaccagcgcacgttgcggccctttggtctgccagtagcccgccagccagtccggcgcgggggttttcacgacattgttatagttttcgacttcggcacagcccgccagcaacatgagcgcacctgcaattgcgagttttttcatcattcgtcctgcatgagaagaaaagaggattgtggcattaaagccctgatgtcgccagcctttccaggttcagagagaaatttgatctaactattatttttgtgaattattaccccgaaaataaatttgcatgatgtatgattcgcgattcttgtttcaaaccttctgagttcagaggctacattcatgtcatggcagcaattcaaacacgcctggttgattaaattctgggcacccatccctgcggtcatcgcggcgggtattctctccacttactattttggcattactggcaccttttgggctgtcacgggtgaatttacccgttggggcggtcagctcctgcagctgtttggcgtccatgctgaagagtggggttattttaaaattatccatctggaaggatcgccattaacccgcatcgacgggatgatgatcctcggcatgtttggcggctgctttgccgcagcgctgtgggccaacaatgtcaaactgcgcatgccgcgcagccgtatccgcattatgcaggccattattggcggcattatcgccggttttggcgcgcgtctggcaatgggctgtaacctggcggcgttctttaccggcattcctcagttctcgctgcatgcctggttctttgccatcgccactgccattggttcatggtttggcgcgcgctttaccctgctgcccatcttccgtattcccgtgaaaatgcagaaagtttctgccgcctcaccgctgacgcaaaaaccggatcaggcgcggcgtcgttttcgtctcgggatgctggtctttttcggcatgctgggctgggcgctgctcacggcgatgaaccaacccaaactggggctggcaatgctgtttggcgtcggctttggtttactgattgaacgtgcgcaaatctgctttacttcggcgttccgcgatatgtggatcaccggacgtacccatatggcgaaagcaatcattatcggtatggcggtgagtgccatcgggatcttcagttacgtacagttaggcgttgaacccaaaatcatgtgggcgggaccaaacgcggtaattggtggtttactgtttggttttggcatcgtgctggcaggcggctgcgaaaccggctggatgtaccgcgcggtagaaggccaggtgcactactggtgggtcggtctgggcaatgtgatcggctcgacgattctggcgtattactgggatgatttcgctccggcgctggccaccgactgggacaaaatcaacctgctgaaaacctttggcccgatgggtggcctgctggtgacatatttgctgttgtttactgcgctgatgttgattatcggctgggaaaaacgcttcttccgccgtgcggcaccgcagactgctaaggagatcgcatgaaaaatatcgttcctgattaccgccttgatatggtgggtgaaccctgcccttatccggcagtcgcaacccttgaggcgatgccgcagttaaaaaaaggggaaatcctggaagtggtgagcgactgtccacagtcgatcaataatattccactggatgcgcgtaatcacggctatacggtgctggatattcagcaagacgggccgaccattcgttatttaattcagaagtaatccctcattcccgctgtggcccacagcgggaacattgttgcctctgacacatagattttacccgccccctctcctattcttttcagtatgatctcaggaggtttctatgtgtggacgctttgcccaatcccaaacgcgtgaagattaccttgcgcttctcgcggaagatattgaacgcgatattccctacgatcccgaacccattggcagatacaacgtcgcgccgggaaccaaagttcttctgctcagtgaacgtgatgaacaccttcatctggatccggttttctggggatatgctcccggatggtgggataaaccgccgctgattaacgcccgcgtagaaactgccgcaaccagtcgcatgtttaaaccgctctggcaacatggtcgggcaatctgttttgccgatggctggtttgagtggaaaaaagaaggcgacaaaaaacagcctttttttatctatcgtgctgatggacaacctatttttatggccgcgataggtagcacaccatttgagcgtggtgacgaagccgaaggatttttaattgtcactgctgcagcagaccagggtctggtagacattcatgaccgccgcccgctggttctgtcgccagaagctgcacaggaatggatgcggcaagagattggcggtaaagaagcatcagaaattgctaccaacggctgtgtgccagcaaaccagttcacctggcacccggtatcgcgcgcggtaggtaatgtcaaaaaccagggcgcggagttaattcaacctgtttgttgacatcctccacgccctgaaggacgaggatccctgctacgttcaggctgtcgcctgaatcatttcggtgggttcctgcttcaacgggcggcctgactgcaccatctctccacaggcaagaacggcgtgccccgccgctaaaatgttacgagcgccatttacatcggcgttcactgtatatccacatacctggcatctgaatttactttgtgacaggcggttttctttcgctgtatgaccacagcacgcgcaacgctggcttgtgtacgctggcggaacagcaagcacctgaccgccacgccagagctgcttgtactcaagctggcggcgcatttcataccagccctgatccagtatcgaacggtttaaacctgattttgcccggacattgcgccccggctggctgaccgtacccgctgctgactttgacatgttgctgaccttcaaatcctcaatgactatcattgcgtggtttttgctgacggtcgttgtgactttgtgaaggtagtccctgcggatatttgcgatacaggaatgcagtcgctgtattttgcgtttctgcttctgccagttgttgctgaatttgaccttgcggcttaactgtcgctgaagtctcgccagcttcttctggtttttctgaaaactgtttacaggctcaaagactgtgccatctgacagcgtggcgagtttagccacgccagcatccagcccgaccattgatgctgaagggtgaaccggagttgatacttcactttctgtctgaatactgatgtaccacttaccgcaggactggctgacagtgacatttttcacaacacccgtgacctgacggctgttccggtagcgcatccagcccagtttcggcagaaaaatacggctgttttcctgatcgagcttaacgccctgcgggtagcggaatacatcattctgtccccgctttttgaatcggggaaaagcagcccgattctggaagaagtttttgtaagcccgctcaaggtctttcagtgactgttgcaatggctgtgacggggcatctttaagccattgcgtttcagtggcatttttccactcaaccagccaggaagccattttcccgtaagggatgtatttattaccgacctcatgattctcattctgacgtgccagagcacgattgaaaacgaaacgacatgcgcctgcgaagcgcctcatttcacgctcctgttgaccaccgggtcttaactggaatttaaatgcttgtagtcgtttcacaggccaaatgatactttggtctgtgaaaaaagaaaccgatatccggcgtggaaggcattgtgttttcctgatgcatgttcacctggtctttgtcaccaaataccgacgtcagatttttgactatgacgcgacagaaaaactacgcacttacttttcaaatgtatgtgctgattttgaagctgaactggttgaaatggatggcgaaccagatcacgtccatttgttaattaactatcctcccaaactggcgatatccagtctggtaaacagcctcaaaggcgtatcgggtaggtgactgcgacgagatcgaccagatattgcagtcaggtattactacaaaggcgttttgtggagtgttggctattttgccagtagctgcggaggtgcgccaatatccgtcatccgccaatacattgaacaacagcaaacacctggttaggtggaaaaccacgccttatatccctgccctgaaggacggggttttacggcgcaccggataagcctggagattatctacaccagcatggacatcattgtactatgccccgtacatgccccatcacatcctcaacatcaaagtattagagccttgcaaaccattatgcgtctcagtttgtctcatctatcttacgcaaaaaaaatagaactaatatcaagcggcgctatattgcgtattaaataaaaccacctcaattacattaataaatctaaacaaacatcatgcaaataatttccatggttatttctaggctatttaaattaaataaataaattatgagtcaatcataaataacaacctttaatataatttaactaccaaatttatattcgttcacaaaataggtaatgactccaacttattgatagtgttttatgttcagataatgcccgatgactttgtcatgcagctccaccgattttgagaacgacagcgacttccgtcccagccgtgccaggtgctgcctcagattcaggttatgccgctcaattcgctgcgtatatcgcttgctgattacgtgcagctttcccttcaggcgggattcatacagcggccagccatccgtcatccatatcaccacgtcaaagggtgacagcaggctcataagacgccccagcgtcgccatagtgcgttcaccgaatacgtgcgcaacaaccgtcttccggagactgtcatacgcgtaaaacagccagcgctggcgcgatttagccccgacatagccccactgttcgtccatttccgcgcagacgatgacgtcactgcccggctgtatgcgcgaggttaccgactgcggcctgagttttttaagtgacgtaaaatcgtgttgaggccaacgcccataatgcgtgcagttgcccggcatccaacgccattcatggccatatcaatgattttctggtgcgtaccgggttgagaagcggtgtaagtgaactgcagttgccatgttttacggcagtgagagcagagatagcgctgatgtccggcagtgcttttgccgttacgcaccaccccgtcagtagctgaacaggagggacagctgatagaaacagaagccactggagcacctcaaaaacaccatcatacactaaatcagtaagttggcagcatcacccacaaaatagtcatgcattgtgtgcaatagaaacagttcagataaagatagggattagactggccccctgaatctccagacaaccagtatcacttatttaagtgatagtcttaatactagtttttagactagtcattggagagcagatgattgatgtcttaggaccggagaaacgcaaacggcgtaccacacaggaaaagatcgcaattgttcagcagagctttgaaccggggatgacggtctccctcgttgcccggcaacatggtgtagcagccagccagttatttctctggcgtaagcaataccaggaaggaagtcttactgctgtcgccgccggagaacaggttgttcctgcctctgaacttgctgccgccatgaagcagattaaagaactccagcgcctgctcggcaagaaaacgatggaaaatgaactcctcaaagaaaccgttgaatatggacgggcaaaaaagtggatagcgcacgcgcccttattgcccggggatggggagtaagcttagtcagccgttgtctccgggggtcgcgtgcgcagttgcacgtcattctcagacgaaccgatgactggatggatggccgccacagtcatcacactgatgatacggatgtgcttctccgtatacaccatgttatcggagagctgcccacgtatggttatcgtcgggtatgggcgctgcttcgcagacaggcagaacttgatggtatgcctgcgatcaatgccaaacgtgtttaccggatcatgcgccagaatgcgctgttgcttgagcgaaaacctgctgtaccgccatcgaaacgggcacatacaggcagagtggctgtgaaagaaagtaatcagcgatggtgctctgacgggttcgagttccgctgtgataacggagaaaaactgcgagtcacgttcgcgctggactgctgtgaccgtgaggcactgcactgggcggtcactacgggcggcttcaacagtgaaacagtacaggacgtcatgctgggagcggtggaacgccgcttcggcaacgagcttccggcgtctccagtagagtggctgacggataatggttcatgctaccgggctaatgaaacacggcagtttgcccggatgttggggcttgaaccgaagagcacggcggtgcggagtccggagagtaacggcatagcagagagcttcgtgaaaacgataaagcgtgactacatcagtgtcatgcccaaaccagacgggttaacggcagcaaagaaccttgcagaggcgttcgagcattataacgaatggcatccgcatagtgcactgggttatcgctcgccacgggaatatctacggcagcaagccagtaatgggttaagtgataacaggtgtctggaaatataggggcaaatccagggatctacttcacaatttaaatgagaaactaaaacttacatcttgaaataatctcattgattggatgaatatttgtagtgcagtgacatcatttttaaataatagttcaaataaaagggctcacgatgaaaaaattaacagtggcaatttctgctgtagctgcatcttaacgtataaactagatttaataataacgaactagatttaataacaacgatatccgtacctatccggatatctaatgtcataagcatccctttaattatcccctcaacctcttgtaactttcccactcttgaactccacatagtccaaacgccggatgcaaaaaaatcacacgtgcatttctgaaattgtgatggaggaagatagtatcaattatatgtgcttataaacgtccccgattagcgcagaagtcaccggattgttcaggctccaataggttgagtatgccgtatttattttccaaaataaaaatcgatgctgttgctccttcataaaatacttttactctctggacgcttttcttagctctcttggtgttatcttaaaacgattatggaacctttcagtaaaacgagaaggacacttgtaaccattttccctggcaatctcgctgatgggttttactgtcgtttgtatagcagacaacgcattatttaacctcacgtcgtccaatatactttgaaaacttactccctcgcttgccagacggcgatgcaatgtggaaacagaaatgtagagatatctcgctaccttgtttgctgtccattttgttccaggttcggatagcattaggttataacaacgacttattaatgattgtttactatctgataaaagtaaacaattaacatgatgtgctcctaatgaaagtagaacgcccattgctaagtgttcctgaatttgcgttgagaagcctcgggaaatagatgtttttagttgctcccaacaatatattaactcggaattctgaggtaagcagaaacctgtcgtgttacgaatttgatcggttatcgcataaagattttggaacttttcaattagatcaatgggataataaagcatttctgcaagataaagacggtaatgctgccaacttactgatttagtgtatgatggtgtttttgaggtgctccagtggcttctgtttctatcagctgtccctcctgttcagctactgacggggtggtgcgtaacggcaaaagcactgccggacatcagcgctatctctgctctcactgccgtaaaacatggcaactgcagttcacttacaccgcttctcaacccggtacgcaccagaaaatcattgatatggccatgaatggcgttggatgccgggcaactgcacgcattatgggcgttggcctcaacacgattttacgtcacttaaaaaactcaggccgcagtcggtaacctcgcgcatacagccgggcagtgacgtcatcgtctgcgcggaaatggacgaacagtggggctatgtcggggctaaatcgcgccagcgctggctgttttacgcgtatgacagtctccggaagacggttgttgcgcacgtattcggtgaacgcactatggcgacgctggggcgtcttatgagcctgctgtcaccctttgacgtggtgatatggatgacggatggctggccgctgtatgaatcccgcctgaagggaaagctgcacgtaatcagcaagcgatatacgcagcgaattgagcggcataacctgaatctgaggcagcacctggcacggctgggacggaagtcgctgtcgttctcaaaatcggtggagctgcatgacaaagtcatcgggcattatctgaacataaaacactatcaataagttggagtcattaccgataaagacctgcttctgggtaattcgcaatataagattcatatccacagggaaataatattatctgattattatcaacagttagactatgcgtctcccaattgataactttttttccctgacggatacgacatgaagctggcataagaggcttaaccctgtgaatctcatgatgtttatgcatccgtatttcttcaatctttaggttagtcctatcttttgccagcatactcttatcctactttacctcataaacgggtattatctcagcggttgcaattttattggcattaagcatataaccaactaacgctccgctggaattagaatccacaggaatcttatcagtttttagagcccatattttaaactggtaatgatggggtttatctcctttgggaggacatgctccaccaaatcccgcatagccaaaatcatttcggccttggacagcaccagtcggaagttttgtaccatcacgtcttcctgcatcagcgggcaaatatgttaccgttgctggaatattagcaacagtccagtgccaccatccgctgcctgtaggcgcatctggatcatacacagttacggcaaagcttttggtgccttctggagcaccagaccaggttaatgagggcgatgtattacccccctcacacccaactccagaaaatacatgagacgttgtaagttgctctcctgtttttatttcattactagtgacctgaaatgctgcggcctgcgcagaaaatgttatgaatgccaatacacttgaaacgataagttttttcataaaaacctctttgttgtgacctatcgttattttatttgatgtgcattgatctcattatgcaaaaaggcgcaatgatcgcgcaaatgcaatcataattataaagttgccccgaacattagccataatatgcacaaatcagattcctgttatctcaaggatgattattttttaatgcggtgcgcttcgtgacaacaagttaatgactaacacaccggcacaaatcaacatcatgcctatgatggctggcaggtccagtcgttggccaaaaaatccccaggaaagcaaactaatcagaacgataccgactcctgaccagatagcataagcaatccctgtaggtatataagccagtgtctgagctaataaccaaaatgatgcacaatagcaaataattgtgccaacagagggccataaccgtgtaaacccctctgaaaacttcattaaggttgtaccaatgacctctgcaagtattgcgccaccaagataaatataagggttcatagcatattctttcctgttcatactggagagaattgtactacagtttgaacacaactcaccgttttcatcctggtgtatgtgtatccagggggctctggcgtggcaagagataaaggcaggaacaataatgatcagaaggaaccccaggctaacaaaagagttcactcttcctatgagcaaagcgaagacaaaacatgttatcgcgtttacggatcgtggatggcagaaaactttcaggatcaggtatccattttaaaccagaaattgagtgagtttgccccatccatgccccacgcggtgagatcggatgtaattaacaacaggttacaaaacctacacctgcatggacatcacttcctgataagccgccaccagcttattacgcacctgaatccccatttgcatagaaactgaggctttttgcatatcggtcatcacatcgtttaacgccacgccgggttcaccgagagtgaatttttctgcctgcgtgcgggcggctgtttgtgtatcgcttatgcgatcgagcgcggcgtgcagctgcccggcaaaactaatggtcggttgtggcagtgattcctgcgcacgcgcactcatcgccgtagcctgtaactggctgataaccccttcaatcccctgtatcgctgacattttcatctcccggataatttctggtagcaaagcttaccagtaagtcaataagacaaaggcgctaaatagcaacaaaaaaacgggtttattggcggatagaaaaaaacgaaagcacaaataatggcagcgtcaatttttcgagtttgctgacccgggagtgagtcttgttccactttgccaataacgccgtccataatcagccacgaggtgcgcgatgaatgcgactgcagcccagacaaaatctcttgagtggcttaatcgcctgcgtgcgaatccgaaaattccattgattgttgccggttccgcggcagtggcggtcatggtcgcactgatcctgtgggcgaaagcccccgactaccgcacattattcagcaatctttccgatcaggatggtggcgcaattgtcagccaactgacgcaaatgaatattccttactgcttcagcgaagccagcggcgctattgaagttccggcagataaagttcacgaactgcgtctgcgcctggcacaacaaggtttgcccaaaggcggcgcggtcggtttcgaactgcttgatcaggaaaagtttggtatcagccagttcagcgaacaggtgaattatcagcgggcgctggaaggcgagctttctcgtaccatcgaaactatcggcccggtaaaaggggcgcgcgtacatctggcaatgccgaaaccgtctttattcgtccgtgaacaaaaatccccttctgcatcggtgacggtaaatctgttacccggccgcgcactcgatgaagggcaaattagcgccattgtgcacctggtttccagcgccgttgctggtctgccgccgggaaacgtcacgctggtggatcagggcggacatctgttaacccagtccaataccagcgggcgcgatcttaatgacgctcagttgaaatatgccagcgatgtcgaaggccgtattcagcggcgtattgaagcaatcctgtcgcctattgttggtaacggtaatattcacgcccaggtcacggcgcaactggacttcgccagtaaagaacaaacggaagaacagtatcgccctaacggtgatgaatctcatgcggcgcttcgttcacgccagcttaatgagagcgagcaaagcggttccggttatccgggcggcgtaccgggggcgttgtcgaatcaaccggcacctgcgaataacgcgccaatcagcacgcctccggcaaatcaaaataaccgccagcagcaggcgagcaccaccagcaatagcgggccgcgtagcacacagcggaatgaaaccagtaactacgaagtcgatcgcaccattcgtcataccaaaatgaacgtgggcgatgtgcaacgtctgtcagtcgcggtagtggtgaattacaaaaccttgccagacggtaaaccattgcctctcagcaacgaacagatgaagcaaattgaagatctgacccgcgaggcgatgggcttttctgaaaaacgcggtgactcgctcaatgtcgttaactcgccgttcaatagcagtgacgaaagcggcggagaactgccgttctggcaacagcaagcgtttatcgatcagttgctggctgccggtcgctggttgctggtactgctggtggcgtggctgctgtggcggaaagcggtacgcccgcagttaacacgtcgcgccgaggcgatgaaagctgtacagcaacaggcgcaggcccgtgaggaagtggaagatgcggtggaagtccgcctgagcaaagacgaacaactccaacaacgacgcgctaaccaacgtctgggggcagaagtcatgagccagcgtatccgtgaaatgtctgataacgatccgcgcgtggtggcgctggtcattcgccagtggataaataacgatcatgagtaacctgacaggcaccgataaaagcgtcatcctgctgatgaccattggcgaagaccgggcggcagaggtgttcaagcacctctcccagcgcgaagtgcaaaccctgagcgctgcaatggcgaacgtcacgcagatctccaacaagcagctaacctatgtgctggcggagtttgagcaagaagctgaacagtttgccgcactgaatatcaacgccaacgattatctgcgttcggtattggtcaaagctctgggtgaggaacgtgccgccagcctgctggaagatattctcgaaactcgcgataccgccagcggtattgaaacgctcaactttatggagccgcagagtgccgccgatctgattcgcgatgagcatccgcaaattatcgccaccattctggtgcatctgaagcgcgcgcaggccgccgatattctggcgttgttcgatgaacgtctgcgccacgacgtgatgttgcgtatcgccacctttggcggcgtgcagccagccgcgctggcggaactgaccgaagtactgaatggcttgctcgacggtcagaatctcaagcgcagcaaaatgggcggcgtgagaacggcagccgaaattatcaacctgatgaaaactcagcaggaagaagccgttattaccgccgtgcgcgaattcgacggcgagctggcgcaaaaaattatcgacgagatgttcctgttcgaaaatctggtggatgtcgacgatcgcagcattcagcgtctgttgcaggaagtggattccgaatcgctgttgatcgcgctgaaaggggccgagcagccactgcgcgagaaattcctgcgcaatatgtcgcagcgtgccgccgatattctgcgcgacgatctcgccaaccgtggtccggtgcgtctgtcgcaggtggaaaacgaacagaaagcgattctgctgattgtgcgccgccttgccgaaactggcgagatggtaattggcagcggcgaggatacctatgtctgataatctgccgtggaaaacctggacgccggacgatctcgcgccaccacaggcagagtttgtgcccatggtcgagccggaagaaaccatcattgaagaggccgaacctagccttgagcagcaactggcgcaactgcaaatgcaggcccatgagcaaggttatcaggcggggattgccgaaggtcgccagcaaggtcatgagcagggctatcaggaaggactggcccaggggctggagcaaggtctggcagaggcgaagtctcaacaagcgccaattcatgcccggatgcagcaactggtcagcgaatttcaaactacccttgatgcgcttgatagtgtgattgcttcgcgcctgatgcagatggcgctggaggcggcacgtcaggtgatcggtcagacgccaacagtggataactcggcactgatcaaacagatccaacagttgttgcagcaagaaccgttattcagcggtaaaccacagctgcgcgtgcacccggatgatctgcaacgtgtggatgatatgctcggcgcaaccttaagtttgcatggctggcgcttgcggggcgatcccacactccatcctggcggctgtaaagtctccgccgatgaaggcgatctcgacgccagtgtcgccactcgctggcaagaactctgccgtctggcagcaccaggagtggtgtaatgaccacgcgcctgactcgctggctaaccacgctggataactttgaagccaaaatggcgcagttgcctgcggtacgtcgctatgggcgattaacccgcgctaccgggctggtgctggaagccaccggattacaattgccgctcggcgcaacctgtgtcattgaacgccagaacggcagcgaaacgcacgaagtagaaagcgaagtcgttggctttaacggtcaacggctgtttttaatgccgctggaggaagtggaaggtgtcctgcccggcgcgcgggtttatgccaaaaacatttcggctgaaggactgcaaagcggcaagcagttgccgctcggtccggcgttattaggtcgcgttctggacggcagcggtaagccgctcgatggcctgccctcccccgatacgacggaaaccggtgcgctgattaccccgccatttaacccgttgcaacgtacaccgattgaacatgtgctggacaccggcgtgcgcccaatcaatgccctgcttaccgttgggcgtgggcagcgtatggggctgtttgccgggtccggcgttggtaaaagtgtgctgctggggatgatggcacgttacacccgcgccgatgtcattgtcgtgggtttgattggtgaacgtgggcgcgaagtaaaagattttattgagaatatcctcggtgctgaagggcgtgcacgctccgtggtgattgccgctccggcggatgtctctccgcttctgcgaatgcaaggtgccgcctatgccacgcgcattgccgaagattttcgcgatcgtggtcagcatgtgttgctgattatggactccctcacccgctacgcgatggcccagcgtgaaattgcgctggcgattggcgaaccacccgccaccaaaggttatccaccgtcggtgtttgccaaattaccggcactggtcgagcgtgccggaaatggcattagcggcggcggctcgattaccgcgttttataccgtgcttactgaaggcgatgaccagcaggaccccattgcagactccgcacgggcgatcctcgacggtcacattgtgctgtctcgccgactggcggaagccgggcactatccggctatcgatattgaagcgtcgatcagccgcgcaatgacggcgttgatcagtgagcaacattacgcgcgagtgcgcaccttcaaacagctgttgtcgagttttcagcgtaaccgcgatctggttagcgtcggcgcgtatgccaaaggcagcgatccgatgctcgataaagccatcgccctgtggccgcagctggagggctatttacaacaaggcatttttgaacgtgcggactgggaagcgtctctccaggggctggagcgtattttcccgacagtgtcataacccaggagataacggtagatggcagaacatggtgcgctggcgaccctgaaagatctggcagaaaaagaggtagaggatgccgcgcgcctgctgggtgaaatgcgtcgcgggtgtcagcaggcggaagaacagctcaaaatgctgatcgattatcagaatgaatatcgcaataacctcaacagcgatatgagtgccgggatgaccagcaaccgctggatcaactatcagcagtttatccagacgctggaaaaagccattactcagcatcgccagcaacttaatcagtggacgcagaaagttgacattgccctgaacagctggcgagaaaagaaacaacgtttgcaggcctggcagacactgcaggaacggcaatccacggcggcactgcttgcagaaaaccgcctcgatcagaaaaagatggatgagttcgcccagcgcgccgccatgaggaaacctgaatgattcgcttagcgcccttgattaccgccgacgttgacaccaccacattgcctggcggcaaagccagcgatgctgcacaagattttctcgcgttgttgagcgaagcattagcaagcgagacaactaccgacaaagcggccccccaggtgctggtggcaacagataagcccacgacaaaaggcgagctgctgatcagcgatattgtttccgacgcgcaacaagcggatttactgatccctgtggatgaaacactgcctgtcatcaacgtcgaacaatccacatcgacaccgttaaccaccgctcatacgatgacgttggctgcggtggctgacaaaaatacgacaaaagacgaaaaagcggatgatctgaatgaagacctcaccgcaagcctgagcgccctttttgcgatgttgccgggttttgacaatacgcccaaagtgactgatgcgccgtcaaccgtgttaccggcagagaaaccaacgctcttcacaaaactgacttctgcgcaactcacaacagcacagcctgatgatgcccccggcacgccagctcagccattaacaccgctggtagcagaagcccagagtaaagcggaagtcatcagcacaccttcaccggtgaccgctgccgccagcccgctaatcactccacaccagacacagccactgctcaccgtcgccgcgcctgtcttgagtgcaccgctgggttctcacgaatggcaacaatcattaagccagcatatttcgctgttcacccgccagggacaacaaagtgcagagttgcgtctgcacccgcaggatttaggtgaagtgcaaatctccctcaaagtggatgataaccaggcgcaaatccagatggtttcgccgcatcagcacgtacgcgccgccctggaagcagcgctgccggtactgcgtacgcagctggccgagagtggcattcagttagggcaaagcaacatcagtggcgaaagctttagtggtcagcagcaggccgcttcccaacaacagcaaagccaacgcacagtaaaccatgaacctctggcgggggaagaagacgatacgcttccggttcccgtctctttacaagggcgcgtaacaggcaacagcggcgttgatattttcgcctaacgtcagaggtagcaccgtaatccgcgtcttttccccgctttgttgcgctcaagacgcaggataattagccgataagcagtagcgacacaggaagaccgcaacacatgactgattacgcgataagcaagaaaagcaagcgatcgctttggctcccgattctggtattcattaccctcgcggcctgtgccagcgcaggttacagctactggcattcgcatcaggttgccgctgaagacaaagcgcagcatcgcgtcgtgccctcaccggtcttctatgcgctggatacctttacggtcaatttgggcgatgcggatcgcgtgctttatatcggtataaccctgcgactcaaagatgaagctacccgctcgcggctgagtgagtatttgccggaagtccgtagccgtttgctgttactgttttcgcgtcaggatgctgccgtactggcgacagaagaaggcaagaaaaacctgattgccgagattaaaaccacgctttccaccccgcttgttgccgggcaaccgaaacaggatgtcaccgacgtgatgtataccgcttttattctgcgataacgacatgggcgatagtattctttctcaagctgaaattgatgcgctgttgaatggtgacagcgaagtcaaagacgaaccgacagccagtgttagcggcgaaagtgacattcgtccgtacgatccgaatacccaacgacgggttgtgcgcgaacgtttgcaggcgctggaaatcattaatgagcgctttgcccgccattttcgtatggggctgttcaacctgctgcgtcgtagcccggatataaccgtcggggccatccgcattcagccgtaccatgaatttgcccgcaacctgccggtgccgaccaacctgaaccttatccatctgaaaccgctgcgcggcacagggctggtggtgttttcaccgagtctggtgtttatcgccgtggataacctgtttggcggcaatggacgcttcccgaccaaagtggaaggtcgcgagtttacccataccgaacagcgcgtcatcaaccgcatgttaaagctggcgcttgaaggctatagcgacgcctggaaggcgattaatccgctggaagttgagtacgtgcgttcggaaatgcaggtgaaatttaccaatatcaccacctcgccgaacgacattgtggttaacacgccgttccatgtggagattggcaacctgaccggcgaatttaatatctgtctgccattcagcatgatcgagccgctacgggaattgttggttaacccgccgctggaaaactcgcgtaatgaagatcagaactggcgcgataacctggtgcgccaggtgcagcattcacagctggagctggtcgccaactttgccgatatctcgctacgcctgtcgcagattttaaaactgaaacccggcgacgtcctgccgatagaaaaacccgatggcatcatcgcccatgttgacggcgtcccggtgctgaccagtcagtacggcactctcaacggtcagtatgcgttacggatagaacatttgattaacccgattttaaattctctgaacgaggaacagcccaaatgagtgacatgaataatccggccgatgacaacaacggcgcaatggacgatctgtgggctgaagcgttgagcgaacaaaaatcaaccagcagcaaaagcgctgccgacgcggtgttccagcaatttggcggtggtgatgtcagcggaacgttgcaggatatcgacctgataatggatattccggtcaagctgaccgtcgagctgggccgtacgcggatgaccatcaaagagctgttgcgtctgacgcaagggtccgtcgtggcgctggacggtctggcgggcgaaccactggatattctgatcaacggttatttaatcgcccagggcgaagtggtggtcgttgccgataaatatggcgtgcggatcaccgatatcattactccgtctgagcgaatgcgtcgcctgagccgttagtgatgaataaccacgctactgtgcaatcttccacgccggtttctgctgcgccactgctgcaggtcagcggcgcactcatcgccattattgccctgatcctcgctgctgcctggctggtaaaacggttgggatttgccccgaaacgcactggcgttaacggtctgaaaattagcgccagtgcttcgctgggcgcgcgtgaacgggttgtggtggtcgatgtggaagatgcacggctggtgctcggcgttaccgcagggcaaatcaatctgctgcataaacttcccccttcagcaccaacagaagagataccgcagaccgattttcagtcggtcatgaaaaatttgcttaagcgtagtgggagatcctgatgcgtcgtttgttgtctgtcgcacctgtccttctctggctggttacgcccctcgccttcgcgcaactgccgggtatcaccagccagccgctgcctggcggtggacaaagctggtcgctcccggtgcagacgctggtgttcatcacctcgttgacgtttattccggcaattttactgatgatgaccagtttcacccgcatcatcattgtttttggtttattgcgtaacgcgctgggaacgccctccgcgccacctaaccaggtattgctggggctggcactatttttgaccttttttattatgtcatcggtgatcgacaaaatttatgtcgatgcgtaccagccattcagcgaagagaaaatatcaatgcaggaggcgctggaaaaaggggcgcagccgctacgtgagtttatgctgcgtcagacccgtgaggcagatttagggttgtttgccagactagcgaataccggcccgttgcagggacctgaagccgtgccgatgcgcattttgctcccggcctacgtgaccagcgaattgaaaaccgcatttcagataggcttcacgattttcattccttttttgattatcgacctggtgattgccagcgtgttgatggcattggggatgatgatggtcccccccgccaccattgctctgccctttaaactgatgctgtttgtactggtggatggctggcaattgctggtcggttcgctggcgcagagcttttacagctagagaggcaaaatgacacctgaatcggtcatgatgatggggactgaagcgatgaaagtcgcgctggcactggctgccccgctgttgctggtggcgctggtcacgggccttatcatcagtattttgcaggccgccacgcagatcaacgaaatgacgctgtcgtttattccaaaaatcatcgccgtatttattgccattattattgccggaccgtggatgctcaatctgttgctggattacgtccgcaccttgttcactaacctgccgtatatcatcgggtaggccgtacaatgatgcaggtgacaagcgatcaatggctttcctggttaagcctgtacttctggccgttactgcgcgtgctggcgctcatttctaccgcaccaattctgagcgaacgcagcgtgccgaaacgggtaaaactggggctggcaatgatgatcacgttcgtcattgccccatcattacctgccaacgatgttcctgttttttcgttctttgctctgtggctggccgtgcagcagatcctgatcggcattgcgcttggttttaccatgcaatttgcctttgccgctgtgcgaaccgctggcgaaattatcggtctgcaaatggggctgtcatttgcgacgtttgtcgatccggccagccatctcaatatgcccgttttagcgcgtatcatggatatgctggcgttactgctgttcctgacatttaacggtcatttatggttgatttcactgctggtcgatacctttcacaccctgccaattggtggcgaaccgttgaacagcaatgcgtttctggcactcaccaaagcggggagtttgattttccttaacgggctgatgctggcgttaccgctcattactctgctgctgaccctgaatctggcattaggtttactgaatcgtatggccccgcaattatccatttttgttattggatttccattaactctgactgtcggtatctctttaatggcggcattaatgccgttaattgcacctttttgcgaacatttattcagtgagatgtttaatttgctggctgatattattagtgaattgccattaatataattccgtaacgtttatcatgttatcctaaggattatccgaaaaataatacctacgaacatcttccaggatactcctgcggcgaaatatttgttttaagctcactcacatatcgcaacatttactttaagacaattccaggcaaattatacaacactttacgggatagtaagtccgcctgaaaaatcgcgagagtggcgcattaggtgacccatgttgttccgtttagtcatgatgaaatattcaggtaaggggaattatcgttacgcattgagtgagggtatgccatgtcaacgattattatggatttatgtagttacacccgactaggtttaaccgggtatctgttgagtagaggggttaaaaaaagagaaatcaacgacattgaaaccgttgatgaccttgccatagcttgtgattcacagcgcccttcagtggtgtttattaatgaggactgtttcatccatgatgcttctaacagtcagcacatcaagcacatcattaatcaacatcccaatacgttatttatcgtttttatggcaattgccaatgttcattttgatgaatatctattggtcagaaaaaatttattgataagttctaaatcgattaaaccggaatctctcgacgatatccttggcgatattctgaaaaaagagacaacgataacctcttttttaaatatgccgacgttatcattgagccgaaccgaatcgagtatgttgcgaatgtggatggcaggtcagggaaccattcaaatctctgaccaaatgaatatcaaagccaagaccgtttcatcgcataaaggtaatattaaacgtaagatcaaaacacataataaacaggttatctaccatgtcgtccgactgacggataatgtgactaatggtatttttgtcaacatgcgctaacacattctgactggtggtttcccaccagtcaggctgaataagattactctgctttctccacaaagataccgtcctgatgccctgcttcattaaagaaccagatgccgagcgggtagtcttccagcgaaaccaggtacattgtgccttcactaaactcctcaactgccagtaccacgccaggacgacgcggaccgccatccgttttgactgttacccgatcattcaccttcatcgttttcctcctgtggctttgtgccagtgtagaacaatttcgtttttctggcagctccaggcgcgcgcgagtgctgattttctcgacggtctatacttaagagatgccaggcggacttaacgactggcggcaacaacagagtaacggttgcgaggaaagatgatgaaaaccgcaaaagagtacagcgataccgcaaaacgtgaggtcagcgtcgatgtcgatgccctgctggcggcgatcaatgaaattagcgaaagcgaagttcatcgcagccagaacgattctgaacacgttagcgtcgatggacgtgaatatcatacatggcgtgaattggcggatgccttcgaactggatattcatgacttcagcgtctctgaagtgaatcgttgaatgcacaataaaaaaatcccgaccctgagggggtcgggatgaaacttgcttaagcaagaagcacttaaaaaattcgttacaccaggaaatctgatgtgttcatcaccttatccgcaatttttttcgctgacaagaaaatattcgcgatatgaataattaacgctacttatgaatagaaatgtgacgtgcgtcaccccttggtggctctggcgtcaacgggatcgctcccgaaaaaatcatctttgattatttgtgctgttttgagaatcatcctggtaaggggagaactgcacgaccatgttttcaattcaacaaccactactggtttttagcgatcttgatggcaccctgctggacagtcatagttatgactggcaaccgactgccctctggctcagccgtttacgcgaagcgaatgttcccgtcattctctgtagcagtaaaacttcagcggaaatgctgtacttgcaaaaaacgttggggctacaagggttaccactgattgccgaaaatggcgcagtgatccagcttgctgaacaatggcaggatatagacggttttccacgcatcatctcaggtattagccatggcgaaatcagccaggttttaaatacgctacgcgagaaagaacattttaaattcacgactttcgatgatgtcgacgatgcaaccatcgccgaatggacgggattaagccgtagccaggcggcgctgacgcagctgcatgaggcgtcggtaacgctaatctggcgcgacagtgacgagcgtatggcacaatttaccgctcgtctgaacgaactgggcttacagtttatgcagggtgcgcgcttctggcacgtcctggatgcctctgccggaaaagatcaggccgccaactggattatcgcgacctatcaacaattatcaggcaaacgcccaaccacacttggcctgggcgatgggccaaacgatgcgcccttactggaggtaatggattacgcggtgattgtgaaagggctaaaccgtgaaggggtgcatctgcatgatgaggatccgacccgcgtctggcgaacgcagcgtgaaggaccggaaggctggcgtgaagggctggaccattttttctccgctcgttaagcgttatcgctcgcgcatacccgattacgcccggcctgtttagcgagataaagccgacggtcagccagtgactggagtcgttcaaaatcataatcaccggtttcctcgctgctacttacccccaacgaggcactgatgcgtatcgtcgtactcttagcaatcaacatctctttttcatttaacttcaggcgaatacgttctgcgacttccgcagcctccgtcagactcgcgcctggcagaatcacacaaaactcctcaccaccgacccgcccggcaacgtcctgcgcacgcaaggaactgctaattaatccggcagcatgagaaagaacacggtcgcccgcctgatgaccaaagcggtcattaatcgctttaaaatggtcaaggtcgacctgaatgacagaaaaaggatgttggtgcgtctgacacaatttcgcgagcggacgggctttttcaaacagtgcgccacgattatataaacgggttaaggtgtcgtgccacgcctgccactgcaacgagctttgcagaacatacatgttgctaaccatccggcgaatcacataccaggagatgagtaacatggtggtaaagagcgcccacagcagggttaatgcaatgctgatactgccgaaatcgccgcgcacgccttcgcttagcgtatggacgcgcaccagcacaccgtcgaaatggtccagacgttcccagctaacatagcgactgtccatacgaatgccgccccgcgtgtcatgttccatcgcctgcgccagcaaggccagttcacgaggatcaaaaatattccctgttggatggtcaggattggaagaggtcaaaaatctcagcttactgtcatagagctgatactcaccatcgaggtttttatcgatggcgtttcttaaaaattgctgcatggtacgcacgggaatactcatccccagcacgccataccagtagttattactgtctaccggaacactgacggtaacctgcggttcagtattgctggcgtgttccggttgcgaagtaaaccagcgtaccgcgcggtgacgattttctcgttgcgaatggccgataaaccagggttgggtgacatagccgtaataacgcgttggtacattgcgcgtaaacaaggtcggctgcgtcgaaacgtaaaatccggcacgcgagacatacatcgcctgttcaaccatcgacgaggtgttgtgcgccagtcgcagcaagtaaccaacttccagtgcagcggtaatttcattgtcgaggctttcattttcgcgagacaggagattcccctcgctgactaatgcatccgatacgccattgactgacagggtgcgtcgtcggttgagttcaatttgccaggcgtgctcgtcgcgatgctgttcgaactcggttacagcattacgcagtgaagtgaaatccagtggcgctacgagagcttcgcgcatgccattacgcaaaaagatcagtttgtcgacgttatactgcaaatgcttatcgagcgcgttggctacgttttccagatgattacgctggctggagatataggcatcttccagcactaccacttcacgccaggtcagcaaggtggaaaaaagcaataccacgataaagcagagattaacgacatgaccaggccccaggcggcgtgcgagttttttcaaccagctctggttttccatttttgtctcgtgctgcaccctgacgactcccaacctgcttttttatgattctggcataacctggcgatagcgtaccgcaaaacagcgataattttataatggtggcatgataagacgcgactatcattcattgcaggcattggcacaccaggccggaagtgatccggcctggtgttaatgataccctttcaaacttcttccgcagaacgactcccctcccccggaacaagctcggtttcatgaaaagcttcccgcttgaccccgtaaccgtcataccaacgacactcaaccataccgctggagtatccagtgacaatcatccgcgggccgccctctttaaccgtaacttcctcactaaccataaagctcatactcgcctccttttttcgagtgaaacttgttcaccttagttgaagatggcgaattttgcataatagcctgtacgagtattaatgtgcctgaccgcgcattttcgctacggctttcactcccagcaccacgatgccgccgatgataaatccaagaatcagatttaaaacagtcggtaatatcatcgccaccactgcactttgctgcccggcgaaatgttcaatggcgtgatgcagcggcgcaataccatgtaccacaataccgccgccgacgaggaacatcgccagcgtgccgacaatcgataacgccttcatcaaccagggcgcaatgatcaataaccctttacctaatgcctgcatcagcgcgctggatttttccgccagccaataccccaggtcatcaatcttaacgataacccctaccagaccgtagacgcccacggtcactaccagcgcgatgcctgaaagcaccagcacctgattaagcaacggcgcttcggccacaatccccagcgtgatggcgacgatttcggcagacaatataaaatcggtacgaatcgccccttttattttgtccttttcaaacttcagcggatcctgcgccgccagcttctccagacgctgctggctctgcgccggatcttctttatgtttacgcgcctccagcatatgcagcactttctctactccttcaaagcagagaaacgcgccaccaatcatcaacagaggcgtaatcgcccacgggataaacgcactgatgatcagcgccagcggcaccagaatcactttattaatcagcgatcctttcgccacgccccagaccacgggaagttcccggttggcccgcacgcctgaaacttgttgcgcattgagcgataagtcatcccctaatacaccggcggttttcttcgccgccagtttgcccatcacggagatatcgtccagtagtgtggcgatatcatcgagcaacgtcagtaaactactcccggccaaaagcattccctctcatttttattgttgaagggtgtaagtatgaagcaaaaacggcagctctgatacttgcttcacaggtcaacattttttttacaatcaagtgcaattatatctctcgccagcagaatgattttcacgtttactatgaaccacctttttatttccaccgtgagggattatgcgtttccgccagttgttaccgctttttggcgcgctgtttgcgttgtatatcatttggggctcaacctattttgtcattcggattggcgtggaaagctggcctccgttaatgatggcaggcgttcgattcctggcagccggtattttattgatggcatttttgctactgcgcggacacaagctccccccgctacgtccgctgctcaatgccgcgctgattggcctgttattgctggctgtcggtaatggcatggtgacggttgccgagcatcaaaatgttccttccggcatcgccgccgttgtggttgcaaccgtgcccctctttaccctggtgcttcagccgcctgtttggcattaaaacgcgcaaactggaatgggtgggtatcgccattgggcttgccggaatcatcatgctcaatagcggtggaaatttaagcggcaatccgtggggcgcgattctgattttaatcggctcgattagctgggcgtttggctcggtttatggctcgcgcattaccttacctgtagggatgatggcgggtgcgattgagatgctggcggcaggcgtggtgttaatgatcgcgtcgatgattgcaggtgaaaaactgacggcgctcccttccctttcaggcttccttgcggtcggctatctggcgctgtttggttcgattatcgccatcaacgcttatatgtatttaatccgtaatgtcagtccggctctcgccaccagctacgcctacgttaacccggtggtcgcggtcttgctgggtacgggactgggcggagagacgctgtcgaagattgaatggctggcgctcggcgtaattgtcttcgcggtggtactggtcacgttgggaaaatatctcttcccggcaaaacccgtagttgcgccagttattcaggacgcatcaagcgagtaaatgaatcccctgcgtgtcgatctgcgcgctggcaccttcgccgcagatccactcttccagacgctcggtaagcgcttcatccgtcagcttctcgcgcccacgtaatgcacactcccagacaatcagtacgcgccagccgagttcctgcaaacgactgatatcgcggcgatcgcgttcaacatttttacctatcttctccagccagaactcggttcgagtcgcaggcactttaaacagatagcagtgatgatgatgccagaagcagccatgggtaaatatcacgcagcgatattcatcaacgacaaaatccgggcttccgggcagactggcgtcctgaacgcgaaacgccaggccctgcccggttaacagactggcgaggcgcttctcaatcgccgtatcacgcgtggcaatcgcgcgcatatttttgctgcgagtggccttatcgtgaacgtcggccatgttgtgcctcttgctgacgcaacgccaccgcctgtttgatttttggctcaagcagttttgccaccgcggcaaagaccggcacgaccaccgagttaccgaactggcgataggcctgagtgtccgaaaccggaatgcggaatttcgcttctcccggcgcttcaaaacccattaagcgcgcgcattcccgaggcgttaaccgacgtggacgatgttgctgattcagcggatcgtcaaaatctttctcacccgtggccatatcccagccgcgatcgattaaaatttccgcgccatctttgtaataacgcgcagacagcgtacgcgtgacgctttgcggattgttcggataaaccattccataaccgaagccgttaccgcgcgcctgatgttttttcgcatatcgatagaggtacttccacagcaccggcgtcaggatatatttcgcctcgaccatcgggtccaacagctgcgccagcgtcactcgctgtgcagggaaacattcgctgatatcacgcagagtaaaatcggctttcagattaagatcgcgacgaaaacccaccagcacgatgcgttcacggtgctgcggcagaaaatgtttaccatcgatgattttcggatcgtccggcccgttatcttctgcatcagccacgtcatagcccagttcgtccagcgtctgcatgatgatgcggaacgttttaccctggtcgtgacttttcaggtttttgacgttttcgagcacaaacatcgccggacgacgcgcgtcgataatgcgtaccacatcaaaaaacagcgtgccctgggtatcgcaggcaaaaccgtgcgcccgcccgagcgagttctttttcgatacgccagccagcgaaaatggctgacaagggaaaccggccagtaaaacatcgtgttcaggaatgtgttgacgaatatgttccgccgccgcctcatcactcacgccttctttatggctgagggtgatgtcgcggatatcttcattaaaatgatgcgtcgccggatcgcaataatggttggctttataagtgcgtaccgcatgtttgttccattcgctggtaaacacgcattgtccgccaatcgattcaaaaccgcgacggatgccgccaattccggcaaatagatcgataaagcgaaacgcataatgcggatgatgtgccgatggtttgggtaacaacgtttgcagatgggcgaactctttctcacttaaacggtgccatgccgagtcattcgccagcgcacgttttaaaattgccgcgctccagtgattctcacccacaccattaagctgcgccaccagcgttttaacatcataaatttgcagcagtttctccagcattgcctgtgcggcattcccggtgctgtatgaatcggttactgatatattttcctgcatagatttaaccggccatctgagatggccgacaggttaacataattacagccatttagggccacgcgcttatcccgcgggtgaaaacgcatctatcaccttgtgatcgacaccttcattctcccccgccagttcggcactgagcttcgccataaactcgactaaaaaatgcgcgttgtgctgcgccagctgcttgcctcttgcggtttgcatggtttgcggtagcttcagcaacttagtctggaaatgatccagcgcgtagcgtttatcatcaagcgggcgatgctgtgcgaacggatcttcaccatcaaacagcgccacgcccaatgcccctgaaacggcaaacacgcgcgccaggccaatcgcccccagggcttccagccgatccgcatcctggacgattttagcttccgttgttaagggggcgatttgcgcgctgaaactgtgagcggcaatggcatgacaaacggcctcgattttctccgccggaaattgctcgaactcttcacggagcaggcgacgcgtctcttctgccgccaggattgaagaacgctgcctttgcggatgatttttcgccaggctcacaatatcgtgaaaataacaggcggttaaaatcaccagcatatcgacatcgtcatctgccgccagcttctgtgccgcgtcctggtgctgatgatggtttttcaaccagttttcgaactgtgcctgccagtgttgtaagtccatacgcgctccgttgccaaagagtcgccaccttagcagtttttattcatagcgtctgctacgtgcgggacgaggtcgggtgtaccaggcaatgctgcctaacaatgccccgaccagagccataaataaaaatccgaccagtgcccctaaccactttcccgcggtagagcctaaatcgctttcaaatcccgacaccggggcatcagggatccggctcatcacccagatgtaacgcgccattgcccagacgaaatagccacaccatgtatagaaagcccacaaagccaatttgccgccagggctgcgagagagtctctcttccatctttgtcgaaccgtattccattttgagataacccggaaaattcagacttagtactattatgtgataaaagtcacatttttccacattggatgagccagtcaagactcaatcattttttgaacaaatagataaattttgcgcaacggcaataattactggaaaaacagcaataaagatttatttatatccttggtaatagttttattaattcacccaaacaatatattagcactgaatacaattataccttttttgatttctgtgtcatgataaccccgttattagccttttatcgtcttgtttatattttttgggccggcatgatgccggctttttttataccttcattaatgtgcgcgtgatcacgcctgccgtttggcgcaacaatcattgatactccctatctttccattcaactcataacatattgatatacatttataattttcatggatgtttatatttagaattcataattctgaattatattaaatagattagaaacattttgaaatcttttaaatacatttgttacacgcaatctttaaaataaaatgaacttcatagaatagtatccaaatgtgctttttttttggataacggcacttattgatatattcatgaagattataatcacaagggaatacataatgaaaagaaaagttctggcaatgctggtcccagcgttattagttgctggcgcagcaaatgcggctgaaatttataataaaaatggcaataaactggatctgtacggaaaagttgatgctcgtcatactttttccgataaccctggcgatgacggcgatgaaactatcatcaagttaggcttcaaaggtgagacccaaattacagatcagttaactggttatggtcaagcactgaccaaaacaaaggctagcgacactgaaggttctgataatacttatgtcaaacttgcttttgcaggtctgaagttcggcgagatgggctcctttgactatggtcgtaactatggtgtgatttacgacgttgaagcctggacagatatgcttcctgtattcggcggcgactcctatacctggactgataacttcatggcaggccgtgcaaatggggtagctacttaccgcaatagtgatttcttcggtctggtggaaggtctgaactttgcattgcagtatcaaggtaacaacgaaggcagcaatgcaggagaagatcaagaaggtactaaaaatggtcacgaagacgttcgcttccagaacggtgatggttttggtctttccacttcatatgactttgacttcggtttgagcttaggtgccgcttactcaaactctgaccgtaccaattctcaagtagctcttggcgggtatcactacaatgaatacagcaaatttgctggtggtgatacagctgaagcatggacatttggtgcaaaatacgacgccaacaatgtttatcttgcaatgggtgatgctgccaacttactgatttagtatatgatggtgtttttgaggtgctccagtggcttctgtttctatcagctgtccctcctgttcagctactgacggggtggtgcgtaacggcaaaagcactgccggacatcagcgctatctctgctctcactgccgtaaaacatggcaactgcagttcacttacaccgcttcccaacccggtacgcaccagaaaatcattgatatggccatgaatggcgttggatgccgggcaactgcacgcattatgggcgttggcctcaacacgattttacgtcacttaaaaaactcaggccgcagtcggtaacctcgcgcatacagccgggcagtgacgtcatcgtctgcgcggaaatggacgaacagtggggctatgtcggggctaaatcgcgccagcgctggctgttttacgcgtatgacagtctccggaagacggttgttgcgcacgtattcggtgaacgcactatggcgacgctggggcgtcttatgagcctgctgtcaccctttgacgtggtgatatggatgacggatggctggccgctgtatgaatcccgcctgaagggaaagctgcacgtaatcagcaagcgatatacgcagcgaattgagcggcataacctgaatctgaggcagcacctggcacggctgggacggaagtcgctgtcgttctcaaaatcggtggagctgcatgacaaagtcatcgggcattatctgaacataaaacactatcaataagttggagtcattacccttgcaatgatgtatgctgaaacccgcaatatgacaccatatggtaatgtgggtatcgcaaataaaacccagaactttgaagctgtagcacagtatcagttcgattttggtctgcgcccatctcttgcatatgtttattcaaaaggcaaagacctcggcggtaacgactataacaacaatggtcatcaagagtatgttgatcaggatctggtcaactatgttgaaattggagcgacctactatttcaataagaacttctcaacatatgttgactataaaataaacttgttggataaagatgacgatttctatgacaacaatggcatcgcaacagatgacgttgttggtgtgggcttagtctaccagttctaatcagccaacgtgctgcggcgtgttactgtaaaactaaacactagcctgagttcgtccctcatcgaattcaggcttttttattggcatttcatctccatctgcggcacacgcaattgccaatgcatatcgatacagcaccttaccctgcccctcctggcacaataacatcaaccagcgactcttcaaaccaacacccaaatgcatttctttatgaattaatccgtaacaaacacgcttcccatatagaaatatttgcaaaaatagtgcatgaaataatcttttctctaccaatccgcgatataaatattcatcagtaccacaatatttcacagcactaaatctctccccgccgccccgtacctttgataatggtctaaaatcattgaggccacttgcgacgacgttgctcaataaggaaaatttggcgtgaataatattcaacaccagtgcagcatcatcattacatacttacacccgccgactaccgctttcgatatattgactcaattttccagactggttaaaaatagcgaccagctcagtcgcaaatatagtgactaccctaactaagcaacaataaggaatacactatgactgttcaaacaagtaaaaatccgcaggtcgatattgctgaagataatgcattcttcccttcagaatattcgcttagccaatataccagtcccgtctctgatcttgatggcgtggactatccaaaaccgtatcgcggtaagcataaaattctggtgatcgccgcggacgaacgttatttgccaaccgataacggaaaactgttctcgaccggtaaccatccgattgaaacgttgctgccgttgtatcatctccatgctgctggtttcgaattcgaagtggcgaccatttccggtctgatgaccaagtttgaatactgggctatgccgcacaaagatgaaaaagtaatgccattctttgagcagcataaatcgttgttccgcaatccgaagaaactcgcggatgttgtcgccagcctcaacgctgatagcgaatatgcagcaatctttgttcctggtggtcatggcgcacttattggtttaccagaaagccaggacgtagctgctgctttgcagtgggcaatcaaaaatgaccgttttgttatctccctttgccacggcccggcggcttttctggcgcttcgccacggcgataacccactgaatggttattccatttgcgcattcccagacgccgcagacaaacaaacgccagagataggctatatgccgggtcatctcacctggtacttcggcgaagagctgaagaaaatgggcatgaacattattaatgacgacatcaccgggcgagtacataaggaccgtaaagttctcaccggcgacagtcctttcgcagcgaatgcgttgggtaaactggcggcgcaggaaatgctggcagcttatgcggattaatccctgttacgtttgaatgtaaacgcataatcaatcgcagccacgttaatactcacgacgtggctgcgttttttcatggttgatttatggcgtactgaagccctatgttaatttctttgcggtaacataatccggaacacattatgcttattgagatagtgatacgtagcacttcccccatgtaattcggcaatcgctttgactaaagaaagaccaagtccctgacctacggaatgacgcgaattatctccccgccaaaatctacggaagagtttttcaggctcatgaattttcgttccaggactggcgacatcaatattaagatagccgttggtatcaagaaaactggttatatgaatacgcgatttttctggtgaatatctaatggcattaacaataagattcgataacattcgttgcagtaaaattttatccgcaaagatttgctgattgcactcgaccttaaagcaaatctctttctcgtctgaaaggtattcaagataatccaacaaattttcgacttccttattgagagaaagcgagtccagtttcaccaaaacattgtttttatctgcccgggcaagaaacagtatgttctctgttaaccgcgaaatattttccagctcttcaatgttaccggcaattgttttttgatattcagcgatacttctggtttgactgagcgtaacctgattctgacccagtaatgcattaatgggcgttctaagttcatgagcgagatcgtcagcaaattgacttagacgctcaaaatctttgactaaagcatgatgcattttattcaacgcctgcccaagaggttttagttctctcggtaatgcgctaacctcaacaggctcccggctatcgttataattcagcgcttccgttacaccactcaactttttgatctctcgtaatcccgttctgattaacagcggacttaatactgagcaaagtacaatggcgacaatgcaaattataatgctattaattttatactgttcaagcatgttatgtctggctgaagccaatttagccacagtaaccgttaatgatggcgaaacttcatcaatattaattcgtaaagcatcaatctcagtatcattaataatgcttctgtaaatgccagctgcgctgattgtctcactagcaggtatgttatttaacatgtcatcactgacatttgtccggttaacaattttattgatgccatcaccatgaatgatcaagatatcctgactaacatccatcatccggttaaagtatacaggtaacgtatctggatttaccccatcaattaacaactgcttgatctgtgctgtccggttaatgagtgttgtatcatcgcgccatttcaactcacttgccaggccattatagagagtccagacaattccagcgccagcaacagacagcagcaatataaaaagcaaggttaaacggacggttatagataatcttttcattatttttttaccgctacgaatgaatagcccatcccccggattgtggcgattagcttttcaggaaaaggatcatcaacttttgcgcggagcctgcgaatggcgacatccaccgtattggtatcactatcaaagttgattccccaaatttcactcgcaataaccgttctgggtataatttcgccagctctggaggccagtagccaaagtaactgaaactccttgcgcgtcagtgtaatactgatattgttcctgctcacactttgacttacagagtccattcttaagccactgatttctaatgttgaattcaaagcgtgatgttgccttaattgtgcccgaacccttgccagcaactcagaaaatgaaaaaggttttaccagataatcatttgctccactgtccagccctctgactctgtcatcgacagaatcccttgcagtaaggcaaataacaggggtttgctttgctgttcttaacgtttgtaagatctgccagccatccatacccggaagcataatatccagaatgatcaatgcataatcatccttcagcgcaagataaagcccatctctgccatcagaaacggcatcaatgacataacccgcttcggaaagcccctgcgttacccactcctgggtcctttgattatcttcaataagtaaaatcttcatgaaaataatatgccataaatcatatgttatagaaacagcctagttcattacaaaattgtaatgctgctgtaaggttaccctggccgctttttcgctatcctcaaaactcattcacatgacaaggatataaacatgttaaagcgttatttagtactctccgtagtaacggcagcattttcattaccttctttggtttatgccgcacaacaaaacattcttagcgtgcacattttgaaccagcaaaccggaaaacccgctgccgacgtgacagtcactcttgaaaagaaagcggacaacggctggttacaacttaataccgccaaaacagataaggatggacgaattaaggcactgtggcccgagcaaactgcaactacgggcgattaccgtgtcgtatttaaaaccggggactatttcaagaaacaaaatcttgaaagtttcttccctgagatccccgttgaatttcatattaataaagtgaacgagcattatcatgtgcctttattacttagccaatatgggtattcaacctatcgtggcagttaatgcataaatatgtaaaagcagatctctgctactgttagggaggacactccctgacagattaacagtaaacggctcttgctggctaacgacaaaaaagtgtgatggcttatgaaaaagaatcaatttttaaaagaatcagatgttacggccgagtcggtattctttatgaagcgtcgacaggtgttaaaagcactgggcatcagcgcagctgcactttctttgcctcacgctgcgcatgccgatctgcttagctggtttaaagggaacgatcgcccgcccgcccccgccggaaaaccgctggagttcagcaagcctaccgcctggcaaaataatctgccactgacgccagtagataaagtctccggttataacaacttctatgaattcgggctggataaagccgatcccgccgctaatgctggtagcctgaaaaccgatccatggacactgaaaatcagcggcgaagtggcaaaaccattgaccctcgatcacgatgatttaacccgtcgcttcccgctggaagagcgtatttatcgtatgcgctgcgtggaggcatggtcgatggtggtgccgtggattggttttccgctgcacaaattgctggcgcttgccgaacccaccagcaatgcgaagtatgtcgctttcgaaacaatttatgcaccggaacaaatgccaggccagcaggaccgctttatcggcggcgggctgaaatatccttatgtcgaaggattgcgtctcgacgaagcaatgcatccgctcacactgatgaccgtgggtgtttatggcaaggcgttaccgccacaaaatggcgcgccggtacgactgattgtgccgtggaaatatggctttaaagggattaaatcgatagtcagtattaagctgacccgcgagcgtccgccaaccacctggaatctggcagcgcctgacgaatacggtttttacgccaacgttaatccgcatgttgatcacccgcgctggtcacaggctaccgaacgatttattggttcaggcggcatcctcgatgttcagcgccagccaacgctactgtttaatggttacgccgaccaggtggcatcgctgtatcgtggcctggatttgcgggagaatttctgaatgcgtctgacagcaaaacaggtgacatggctgaaagttagcctgcatcttgccggattgttgccgtttctctggctggtctgggcgatcaatcacggtggactgggtgccgatccggtgaaagatattcagcattttaccggtcgcactgcactgaaatttttgctggcgaccttgttaatcacacctctggcacgctacgcaaaacagccgttattgatacgcactcgccgcctgttaggcttatggtgctttgcctgggcgacactgcatttaaccagttacgcattgctggagctgggcgtgaataatctggcgttattaggcaaggagttaattacccggccttatttaacgttaggaattatcagctgggttattttgcttgctttagcgtttacttcaacccaggcgatgcagcgaaaactcggcaagcactggcaacagttgcataatttcgtctatcttgtcgcgatcctggccccaatacattatctgtggtcagtgaagattatttcaccgcagccgctcatctacgctgggctggctgtactgcttttagccttacggtataagaagttgcgttccctttttaagcggttacgcaagcaggttcacaacaaattatctgtataacttcatattgccgacaaagtacgcgttatccctgccggatgtggcgcgagcgccctgtccggcctgcgcagatcacatcaggttatgtttcgtttgtcatcaacctcaaattatcaacataattcattttatttcaataagatagataagtacacctgagaaaactatgctctcatctcctaagagttgttgcattttgccatatgttacaatataacattacacatcatatacaatgactctggaggaaactgttttggcaattcgtcttcacaaactggctgttgctttaggtgtctttattgttagcgctcctgccttttcgcatggtcatcactcacacggcaaacccttaacagaggtcgaacaaaaagctgctaatggtgtttttgatgatgccaatgtacaaaaccgaacgctcagtgactgggatggagtctggcaatccgtttatcctttactgcaaagtggcaaacttgaccccgtctttcagaagaaagcggatgcagataaaattaaaacatttgctgaaattaaagattattatcacaaaggttatgcaacagatatcgagatgattggcattgaggacggcattgttgaattccatagaaataatgaaacaacatcctgtaaatatgattacgatggatacaaaatactcacctataaatcaggcaagaaaggcgttcgttacttattcgaatgtaaagatcctgaaagcaaagcccctaaatatatacaatttagcgatcatataattgcaccacgaaaatcatctcattttcacatttttatgggtaatgattcacagcaatttttattaaatgaaatggaaaactggccaacgtattatccatatcagttgagtagcgaagaagtggtcgaggaaatgatgtctcattgagtattctcatgataacgcctcgatgccgctttagtaagtcatcataactgccactggtccatccacaaacgccactgaacgcaagctagctacagacacgctcatcactatgacgtgtctgtatattaataagctaacccgcattgagttaaccaataacggattccatacacaatacggccaacagagaaagatacctgtgctcacgccattgcttatattggctggttacaatgtgcactatcaattttttaaataacaaattcttaaaaccacatctgtataaggaatttttaaggttcgtgggatagcttgactgtaaaaattacaggagctacaaaaatgaaccgattctcaaaaactcaaatttatttacattggataacgctgcttttcgttgcaataacctatgccgcgatggaactccgtggctggtttcctaaaggtagtagtacttatctgctgatgcgagaaacacattacaatgcgggtatattcgtttgggtgttaatgttttcacgcctgattataaaacaccgttatagtgatccttctattgtaccaccgccacctgcctggcaaatgaaagcggcttcgctaatgcacatcatgctttatataaccttccttgcacttcctctgctggggattgctttgatggcttacagtggaaaatcgtggagtttccttggtttcaatgtgtctccctttgttaccccaaacagcgaaattaaagcactgataaaaaatattcacgaaacctaggcaaatataggttactttttaatcgcagctcacgctggcgcagcactctttcatcactacattcagaaagataatactctgttacgaatgatgcatcgccgcaaataagtcgatcccctgacaaggaaatgtgaaccatgtacatcaacgcgtcataaatgtttacgcaagtgcacaatgcatcctttctactatcaacaaggaggagcagaaactgtgtaaatcgtacaatggtaagacttatcaaaaatacaggttaattttggtatttaaaccttttttacttgttagtatgatacaaaggctttcaaaaaagctgggaaattcaacaactcttggaaattatggactttgtcccgcggctttaatctgacggccgcgttccttttttgactcaattattgaccccttctctacgcaacttcagttcccaccaccaactttgcggcagtttcataggatgaatgtctaaaagaataatggtgagcgataagaaaacgactgaataactgcacattttcgctcgaaagcttcctgtcagatccatagcgaatcaagtgctgaatgtcacagtatcgaacagaaaacagtgacgatctaacccttcaagaatattctacaattgttctgtttaggaaaagcaaggcgggaagtcaggagataagtcattgataaagtggcggagagagggggatttgaacccccggtagagttgcccctactccggttttcgagaccggtccgttcagccgctccggcatctctccgttcagatggttgccatgatgccaggaaatttggcattttaacagtccctgtccgtgcaattttgttcaagtgacgagtttgcgagcaaaacgatgattaagtggccctggaaagtacaagaatcagcacatcaaactgcccttccctggcaggaagcactatcgatcccccttttaacgggtctgacggaacaggaacaaagcaaattagtcactcttgccgaacgttttttacagcaaaagcggcttgttcctttacagggctttgaactggattcattaagaagctgccggatagcacttctattttgcctacccgttctggagttaggactggaatggctggatggttttcatgaagtcttaatttatcctgcgccatttgtggtcgatgatgaatgggaagacgatatcggtctggtgcataaccaacgtattgttcagtcaggtcagagctggcagcaagggcctatcgttttgaactggttggatatacaagattcttttgatgcatctggttttaacctgattattcatgaagtcgctcataagctggacacccgtaacggcgatcgcgccagcggagttccctttattccgttgcgtgaggttgctggctgggaacacgatcttcatgctgcaatgaacaacattcaggaagaaatcgaattggttggcgagaatgcggcgagcattgatgcttatgcagccagcgatcctgctgaatgttttgccgtactttctgaatatttctttagcgccccagaactttttgctcctcgtttcccttcattgtggcaacgtttctgccaattttatcaacaagatcctttgcagagactgcatcacgctaatgatacagactcgttttcggcgacgaatgttcattaattaacaactttgcagattaattaaccaattgaaatgacttatgaaatttagtgttgacagacaaggtaccgctaagtaatatgtgccccgttcacacgattcctctgtagttcagtcggtagaacggcggactgttaatccgtatgtcactggttcgagtccagtcagaggagccaaattctaaaaattcgcttttttagcgcaatgtcactgaccttagttgaacattgttttttaacggatagcgggtttttaacaccttaagcgccctcgacctttatggttgagggcgttttgctatgaacgccatcaccattttcccctcgattataaaacttgagttattcagtagtctcccctcttgcaactcacacccaaaactgcctaacgaaaagttattaattttcaatcgtattgctatcagtatttacattttttcgctgtgctagaaagggcgcatttatgttagctcgttcagggaaggtaagcatggctacgaagaagagaagtggagaagaaataaatgaccgacaaatattatgcgggatgggaattaaactacgccgcttaactgcgggtatctgtctgataactcaacttgcgttccctatggctgcggcagcacaaggtgtggtaaacgccgcaacccaacaaccagttcctgcacaaattgccattgcaaatgccaatacggtgccctacacccttggagcgctggaatcggcccaaagcgttgccgaacgtttcggtatttcggtggctgagttacgcaaactcaaccagtttcgtacgtttgctcgaggttttgataatgtccgccagggtgatgaactggatgtcccggcacaagttagtgaaaaaaaattaaccccgccgccgggtaatagcagtgacaacctcgagcaacagatagccagtacttcacagcaaatcgggtctctgctcgccgaagatatgaacagcgagcaagcggcaaatatggcgcgtggatgggcctcttctcaggcttcaggcgcaatgacagactggttaagccgcttcggtaccgcaagaatcacgctgggcgtggatgaagattttagcctgaagaactcccagttcgattttctccatccgtggtatgaaacgcctgataatctctttttcagtcagcatactctccatcgtactgacgagcgtacgcagattaacaacggcttaggttggcgtcatttcactcccacatggatgtcgggcatcaacttctttttcgaccacgatcttagccgttaccactcccgcgccggcattggcgcggagtactggcgcgactatctaaaattaagcagtaacggctatttgcgactgaccaactggcgcagcgcacctgaactggacaacgattataaagcacgcccggccaatggctgggatgtacgcgcagaaagctggctacccgcctggccgcaccttggcggtaaactggtctatgaacagtattatggcgatgaagtggccctgttcgataaagacgatcggcaaagtaatcctcatgccataaccgctggacttaactatacccccttcccgctgatgaccttcagcgcggagcaacgccagggtaaacagggcgaaaatgacacccgttttgccgtcgattttacctggcaacctggcagcgcaatgcagaaacagcttgacccgaatgaagtcgctgcacggcgtagccttgcaggcagccgttatgatctggtggatcgcaacaacaatatcgttctggaatatcgcaaaaaagaactggttcgcctaaccctgacagaccccgtgacagggaagtcaggagaagtgaaatcactggtttcgtcgctacaaaccaaatatgccctgaaaggctataacgtcgaagccaccgcactggaagctgccggtggcaaagtggtcacaacgggtaaagatattctggttaccctgccggcttaccggttcaccagtacgccagaaaccgataacacctggccgattgaagtcaccgccgaagatgtcaaaggcaatttgtcgaatcgtgaacagagcatggtggtcgttcaggcacctacgctaagccagaaagattcctcggtatcgttaagtacccaaacattgaacgcggattcccattcaaccgccacactgacttttattgcgcatgatgcagcaggtaatcctgttgtcgggctggtgctctcgacgcgtcacgaaggtgttcaggacatcaccctttctgactggaaagataatggtgacggaagctatacccagatcctgaccacaggagcgatgtctggcacgctgacgctgatgccacagctgaatggtgtggatgcggctaaagcccccgccgtggtgaatatcatttctgtttcgtcatcccgaactcactcgtcaattaagattgataaggaccgttatctctccggcaatcctatcgaggtgacggtagaactgagagatgaaaatgacaaacctgttaaggaacaaaaacagcaactgaataacgcagtcagcatcgacaacgtgaaaccaggagtcactacagactggaaagaaaccgcagatggcgtctataaggcgacctataccgcctataccaaaggcagtggacttactgcgaagctattggaatgaagatttgcataccgctggatttatcatcgacgccaacccgcagtcagcgaaaattgcgacattatctgccagcaataatggtgtactcgccaatgagaatgcagcaaacaccgtctcggtcaatgtcgctgatgaaggaagcaacccaatcaatgatcataccgtcacgtttgcggtattaagcggatcggcaacttccttcaacaatcaaaacaccgcaaaaacggatgttaatggtctggcgacttttgatctgaaaagtagtaagcaggaagacaacacggttgaagtcacccttgaaaatggcgtgaaacaaacgttaatcgtcagttttgtcggcgactcgagtaccgcgcaggttgatctgcagaagtcgaaaaatgaagtggttgctgacggcaatgacagcgccacaatgaccgcgaccgtccgggatgcaaaaggcaacctgctcaatgacgtcatggtcactttcaatgttaattcagcagaggcgaaactgagccaaaccgaagtgaatagccacgacgggatcgccacagctacgctgaccagtttgaaaaatggtgattatagggttacggcctctgtgagctctggttcccaggctaatcaacaggtgaattttatcggtgatcaaagtactgctgccctgaccctcagtgtgccttcaggtgatatcaccgtcaccaacacagctccgcaacatatgactgcaaccttgcaggataaaaatggcaacccactaaaagataaagaaatcaccttctctgtgccaaacgacgtcgcaagtaagttctcgattagcaacggaggaaaaggcatgacggatagtaacggggttgcaatcgcctccctgaccggcacgttagcgggcacgcatatgatcatggctcgtctggctaacagcaatgtcagcgatgcacagccaatgacgtttgtggcggataaagacagagcggttgtcgttttgcaaacatcgaaagcggaaatcattgggaatggcgtggatgagacaactctgacagcaacagtgaaagatccgtcgaatcatccggtggcggggataacggtaaacttcaccatgccacaggacgttgcggcaaactttacccttgaaaataacggtattgccatcactcaggccaatggggaagcgcatgtcacgctgaaaggtaaaaaagcgggcacgcatacggttaccgcaacgctgggtaataacaataccagtgattcgcagccggtaacatttgtggcggacaaagcctcggctcaggttgtcctgcagatatcaaaagatgagatcacaggtaatggcgtcgatagcgcaacgctaactgcaacggttaaagatcagttcgacaatgaggtgaataatcttccggtaacattcagctcagcctcttcaggactcaccctgaccccgggagtaagtaataccaatgagtctggcatcgcgcaggccactctcgcaggcgttgcctttggtgagcagacggtcactgcatcactggctaataatggtgccagcgacaacaaaactgtgcattttattggcgacacagcggcggcaaaaattatcgagttgacgcctgtcccagacagcataatcgccggtaccccgcagaacagctccggcagcgccatcaccgccacagtcgttgataataatggctttccggtgaaaggtgtgactgtgaacttcaccagcagaacaaactctgccgaaatgacgaatggcggccaagccgtaacgaacgaacagggtaaggctaccgtcacttataccaatacccgctcctcgatagaatcaggagcgagaccggataccgttgaggccagtctggaaaatggtagctccacgcttagcacatcaattaatgtcaacgctgatgcgtctacggcacatctcacctggctacaggcactttttgatacagtctccgcaggcgagacaaccagtctgtatattgaggtgaaggataattacggcaacggtgtccccagcatcaggtgaccctcagcgtttcaccaagtgaaggcgtgacccccagtaataacgctatatatactaccaaccacgacggcaatttttacgcaagctttaccgctacaaaagccggggtttatcaagtgacggcaaccctcgaaaatggcgattcgatgcaacaaacagtgacctatgtgccgaacgtcacgaatgccgaaatcacgctggcaacctcgaaggatccggtgattgccgacaataacgatctcacgacactaacagcaacagtcgctgatacagagggcaatgcgatagccaacactgaagtaacatttactctgccggaagatgttaaggcgaacttcacgctgagcgatggcggtaaagcgattactgatgctgaaggcaaagcgaaagtcacgctgaaaggtacaaaagcaggcgctcatactgttacagcatcgataactggcggtaagagtgagcagttggtggtgaactttactgcggatacgctcactgcgcaggttaatcttaacgttaccgaggacaattttatcgctaataacgtcgggatgaccaggctgcaggcaacagtgactgatggaaacggcaacccgttagccaatgaggcggtgacattcacgctaccggcagatgtgagcgcaagctttactctcggacaaggcggttccgccattactgacatcaacggcaaggctgaagttacactgagcggtacaaaatccggcacctaccccgtgacagttagcgtgaacaattatggtgtcagtgatacgaaacaggtgactttgattgccgatgctggtaccgcaacactagcctccttaacctctgtatactcattcgtcgtcagcacgaccgagggcgcgaccatgactgcaagcgtcactgacgctaacggcaacccggtagaaggcataaaagttaatttccgcggaacctccgtcacgctaagcagcaccagcgttgaaacggatgatcggggtttcactgaaattcttgtgacaagcaccgaagtcggactgaaaacagtttcagcctctctggcagataaacctactgaagtcatatcgcgattactgaatgcaaaagcagatattaattctgcaacgattaccagtctggagatacctgaaggtcaggtcatggtcgcacaagacgtagcagttaaagctcacgtcaacgaccagtttggcaacccgattcttaatgaatctgtaacattcagtgcagagccaccagagcacatgaccatcagccaaaatattgtctctactgatacgcatggtatagccgaggtctccatgacgcccgaaagaaacggttcgtatatggtgaaagcatccctggcgaatggagcctcacttgagaaacaactggaggctattgatgaaaaactgacactctcggcgtccagcccgcttatcggtgtcaattccccaacaggtgcaactctgacggcaacgctaacttctgcaaatggcactccagtggagggtcaggtcatcaactttagcgtaacgccagaaggtgcgacgttaagtggcggaaaagtgagaactaactcttctggtcaggctccagtcgttctgaccagcaataaagtcggtacatatacggtgactgcatcgttccataacggcgtaacaatacagacacagacaaccgtgaaagtcactggcaactcaagcaccgcccatgttactagctttatcgctgatccatcgactatcgccgccaccaacagtgatttaagtaccttaaaggcaacggttgaggatggcagtggtaacctgatcgaaggtctcactgtgtactttgccttaaaaagcggctctgccacattaacgtcattaacagcggtgaccgatcaaaacggaatcgcgacaacaagcgtgaaaggagcgatgacaggtagcgtcacggtaagcgcagtcacgaccgctggtggaatgcaaacagtagatataacgctggtggcaggcccagcagacgcctcaaagtcagtccttaagaacaatcggtcatcattgaaaggagactttaccgatagtgctgagctacatcttgttctgcacgatatatcaggcaatccgatcaaagtttctgaagggctggaatttgtacagtcaggtaccaacgtgccctatgtgcaagttagtgcaattgactacagtaaaaatttctcaggcgagtacaaagccactgttacaggaggcggagagggtatcacaacgctgatccctgtattgaatggtgttcatcaagctggtctgagtaccacaatacaattcactcgcgcagaagacaaaataatgagcggtacagtatcagtcaatggtactgacctaccgacaactacattcccttcgcaggggttcaccggggcgtattatcagttgaataatgacaactttgccccaggaaaaacggcggctgattatgagttttcaagctctgcctcctgggtcgatgttgatgctaccggtaaagtgacatttaaaaatgtcggcagcaattcggaaaggattacggcgacaccaaaatcaggaggccctagctatgtatacgaaatccgtgtgaagagttggtgggtgaacgccggcgaggctttcatgatatacagccttgctgaaaatttttgcagcagcaatggctacacgctccccagagcaaactatttaaaccacagtagttcccgaggcatcgggtcactgtacagtgaatggggagatatggggcattacacgactgaagctggttttcaatcaaatatgtattggtcatctagtcccgcaaactcaagcgaacaatacgtagtttccctggcaacaggtgatcaaagcgtatttgaaaagcttgggtttgcttatgcgacatgttataaaaacctctgattttccgttataatttcttaaagagtgctccattcggagctctcttttttacattccctctatagagcttgcccttctctcacagaaaatgaataaataaaaatgcggcaccgccagaattgcgttcgatgtgactatgatcgtatccggtgagtactgctttgattcaaaggctggttttctgtgatgattgaccagcctcagagtattgatgacaccaccgttcataacagatcggcattactatgcataagtactgtctcatattctcgccaaaacactttttaatgcctttgcgaattcatccagacttatattgtcaattttttgcccaacgacgactgactccgagacatcggccattgcgggccatcgcgttttgtaatcagcataaattgcaacaacaggggtattataggcacttgccatatgtaatattgaggtgtcaggagttattgcgatataagcatcttttatgattgctgctgaacgtttaatcgagggtggtaaggataaacggtagacattattataacaatccactaatgccctggctttatcttcacctttgggtccatgaacgatcactattggtatatctgtttcactttgaatttttgctattagattttctgcaatcgataatgaaaatgtacgttcctgcgagctaccttctaaattgaacgcaatgtaagatcctaacgatcgcatttcctcgcgcacctcatcgagtacatcctcacttagtggcaattcatatattggcctgactgctggaaaacccgcctcacgcatcataaatgcccatgtcataggtacgggagcccggagtttctgatccatacgggacgcgttcttgcacaaaggggagtagcaattcatggttataccaacaacctgaaaattcgtttttgctttcaactgactgataaataacatcgttttcaggttctttttacgcatcccctcaatacaaagatccggcgtaccgtattgctgtgttatgttctttgctaaatcttttatttcttttaatgttgcgtgatcctgcatagtcattgtgactaatgttaatttagtctgttcaagtttaagcgcattaaagacttctaaattaattgtcgacgttacaattaaaagatgcttaattttatgcaattcaagcgcccgaataacaggaaagatggccatagcatcgccaatctgatcgggaatatggatgacaacaaagtctgttttttcaatattgaaattataagctttataatcgtagtaactaaatgcaatacgtctcaacaatgatgctaaaaacatacctaacctcgcctccctactggttataatgcaatgcagtctatcagactcatcagggtgccattttgtgcatatgcggacttttatgtttcatatctctaacctgtgggtcctctgcttaatccttaaacaacaccagcaactcctgcgctttcatcttccatcgaatttttcatgttgccgctaatcagccataaaatcatttgcagatgcgctctgtcgaggtagtctcataaggttcgtttatagatcgacggcaatgtgagttaccttttccatactaattataaaaagacagtacaaacaggatcattatggactccacgctcatctccactcgtcccgatgaagggacgctttcgttaagtcgcgcccgacgagctgcgttaggcagcttcgctggtgccgtcgtcgactggtatgattttttactctatggcatcaccgccgcactggtgtttaatcgcgagtttttcccgcaagtaagcccggcgatgggaacgctcgccgcatttgctacctttggcgtcggattccttttccgtccgctcggcggtgtcattttcggtcactttggcgaccgactgggacgtaagcgcatgttaatgctgaccgtctggatgatgggcatcgcgacagccttgattggtattcttccttcattctcgaccattgggtggtgggcacctattttgctggtgacactgcgtgtcattcagggatttgccgtcggcggcgaatggggaggcgcggcgttgctttccgttgaaagtgcaccgaaaaataaaaaagccttttacagtagcggtgtacaagttggctacggtgtaggtttactgctttcaaccggactggtttcattgatcagtatgatgacgactgacgaacagtttttaagctggggctggcgcattcctttcctgtttagcatcgtactggtactgggagcattgtgggtgcgcaatggcatggaggagtccgcggaatttgaacaacagcaacattatcaagctgccgcgaaaaaacgcatcccggttatcgaagcgctgttacgacatcccggtgctttcctgaagattattgcgctacgactgtgcgaattgctgacgatgtacatcgttactgcctttgcacttaattattcaacccagaatatggggctaccgcgcgaacttttccttaatattggtttgctggtaggtggattaagctgcctgacaattccctgttttgcctggcttgccgatcgttttggtcgccgtagggtttatatcacaggtgcgttaatcggaacgttgagcgcatttcctttctttatggcgcttggtgatgctgccaacttactgatttagtgtatgatggtgtttttgaggtgctccagtggcttctgtttctatcagctgtccctcctgttcagctactgacggggtggtgcgtaacggcaaaagcactgccggacatcagcgctatctctgctctcactgccgtaaaacatggcaactgcagttcacttacaccgcttctcaacccggtacgcaccagaaaatcattgatatggccatgaatggcgttggatgccgggcaactgcacgcattatgggcgttggcctcaacacgattttacgtcacttaaaaaactcaggccgcagtcggtaacctcgcgcatacagccgggcagtgacgtcatcgtctgcgcggaaatggacgaacagtggggctatgtcggggctaaatcgcgccagcgctggctgttttacgcgtatgacagtctccggaagacggttgttgcgcacgtattcggtgaacgcactatggcgacgctggggcgtcttatgagcctgctgtcaccctttgacgtggtgatatggatgacggatggctggccgctgtatgaatcccgcctgaagggaaagctgcacgtaatcagcaagcgatatacgcagcgaattgagcggcataacctgaatctgaggcagcacctggcacggctgggacggaagtcgctgtcgttctcaaaatcggtggagctgcatgacaaagtcatcgggcattatctgaacataaaacactatcaataagttggagtcattacctggcaattggtgagctaagcgttatatcgggatggaataagatgcgggtttttattatttgttatgccgggcattagactttaacaataacgggaaatctgaactgcccggagtttaccgtgaatttccaacaactaaagataatccgcgaggctgcacgtcaggattacaacctgacagaggttgcgaatatgctttttacctcacagtccggcgtcagccgtcatattcgggaactggaggatgaacttggcatcgaaatatttgttcgacgaggtaagcgactgctgggcatgactgaaccgggcaaagcattactggtcattgcagaacgtattctgaatgaagccagtaatgttcgtcggcttgcagacctgtttaccaacgatacgtctggcgttctcactattgcaacgacgcatactcaggcacgttatagcttgccagaggtcattaaagcttttcgcgaacttttcccggaggttcggctcgagctaatccaggggacgccacaggaaattgcgacgttgttgcaaaatggcgaagctgatattggtatcgccagcgagcgtttgagtaatgacccgcagctcgtcgccttcccgtggtttcgttggcaccatagtttgcttgttccactcgatcatcccttaacgcaaattacaccattgacgctggaatcaatagcgaagtggccgttaatcacttaccgacaggggattacggggcgctcacgtattgatgacgcatttgcccgcaaaggtttgctggcagatattgtattaagtgcgcaggattctgatgtcattaaaacctatgttgctcttgggcttgggatcggattagttgccgaacaatccagcggcgaacaagaggaagagaatttaatccgtctggatacgcggcatcttttcgatgctaatactgtctggttgggactgaagcgaggacaacttcagcgtaactatgtctggcgctttctggaactttgtaatgcaggactgtcagttgaggatatcaagcggcaggtgatggaaaacagtgaagaggaaattgattatcagatatagcaaaaagcccgctataaaagcgggcttttcagaaatttggctcctctgactggactcgaaccagtgacatacggattaacagtccgccgttctaccgactgaactacagaggaatcgctgttgaggcacatcttaacggcgaaaaatcttttgtcaaacccgatttttaaattccccaactgtttgccgtttctatcaacagtttgttgcatttgcagacaatttgttggcgaaaatctttgcagctttgctgattctccctcattatttgaaatgtggtttcactttctgcaattaaggtcggctttgaatatctcctctgctttacgccaggttgttcacggcactcgctggcacgctaaacgcaagagctacaaagtgttgttctggcgcgagataaccccgcttgctgttcctatcttcatggagaatgcctgtgtcctgttgatgggggttctgagcacttttctggtcagctggctgggaaaagatgcgatggccggcgtgggattggcggacagcttcaatatggtcattatggctttttttgctgctatcgatcttggtactactgtcgttgtggcatttagtctcggtaagcgggatcgacgacgagcgagggtggcgacgcggcagtcattggtgatcatgacgttgtttgccgtactgttggcaacgcttattcatcattttggcgaacaaattattgatttcgtcgcgggtgatgccacgacagaagttaaagcactggcgttgacttatctggagctgacggtactcagttatccagcagctgccatcactcttattggtagcggggcacttcgtggtgcagggaatacgaaaataccgctattgattaacggtagcctgaatattcttaatattattattagcggcatattgatttacggccttttctcctggccgggactgggatttgtcggggcagggctgggtttaaccatttctcgttatattggcgcagttgcaattttgtgggtgctggcgattggttttaatcctgcgctaaggatttcgttaaagagctattttaaaccgctgaattttagcattatctgggaagtcatggggattggtattcccgcgagtgtcgaatcagtgttatttaccagtggtcggttattaacccaaatgttcgttgccgggatggggaccagtgttattgccggaaattttatcgcgttttcaattgcggctcttatcaacttacccggaagtgcgctcggctctgcttctacgatcattacaggccgaaggttgggggtagggcagatagcgcaagcagagattcagttgcggcatgtgttctggctttccactcttggattaacggccatcgcctggctaacggctccctttgccggggttatggcatcgttttacacccaggatccacaggttaaacatgtcgttgtgattctgatttggctaaatgctttatttatgcctatttggtccgcctcatgggtgctacccgctggatttaaaggtgctcgcgatgcccgttacgccatgtgggtttctatgttgagcatgtggggttgccgggttgtcgtcggttatgtgctgggcatcatgcttggctggggtgtggttggtgtctggatgggaatgtttgccgactgggctgtgcgggccgtgctgttttactggcgaatggttactggacgttggctgtggaaataccctcgatccgaaccgcaaaagtgtgaaaaaaagccagttgtgtcggaataaacgacaaaatgcagattatttcagcaaacgatttcaaatttaaaaaacaggctttgacattgtgggtgggcatcgctaatattcgcctcgttctcacgattcctctgtagttcagtcggtagaacggcggactgttaatccgtatgtcactggttcgagtccagtcagaggagccaaattttagttttgagacatctctatgagtctcaaaacagttaaaaaataaaaattatttttacccggttaccttgtaaaaaagtgaccggtttttttgatttctgtgtttcgtgcgcttaatcgagtctcacgcttcagtgagcaaattgcccctccccaacagacatcacgattcgcaaggtcaaaaactctgttccatgaagtaccgtacaaagataaagagaaaaatgccttatgcgggatgtcgctatcgcgtctttatcgggaaactatgcgtaattgccactttgccttctgtaatcagaaaaagaagaactggaattttaataaatattatttctctgggaacgggggggtataatcaatatgacgagttgaatcttatattttttataagaattatatgagattaaagaaatctgccgtaaagacagatttctttaaaagataattagagatttgcgacgttatgataaactttttgtacatcgtcgtcatcttcaagggcatcaacaagcccttcaaagatttctaaatcttctggggaaagctcaacttcagattgagcaatcatttctaattctgttgttgagaactcagtgattccagctgcttttagagccgcgattcctttatgaaggtcagtaggttcggtataaataacaatgttaccttcttcttcagtcacatcacgaacatcaacttcagcttcaagtaaaatttcaaaaatatggtcagggtctgatcctttaaatacaatcacaccagcattgtcaaacatatagctgacagaacctgccgctccgatattgccgccttttttattgaaaattgtgcgaacgttagcaatcgtacggttaacatttgaagtcaatgtctcggcgataatcattgagccattaggaccaaagccttcataacgtccctgcacgaacgtttcatctccgccgcctttggctttatcaattgctttatcaataacgtgctttggaacttgtgcctgctttgcacgttcaataacgaattttaaagatgtgtttaattctggatcgggttcaccttgtttagcagcagcatagatttctacaccgaattttgcataaattttagacgttgcaccgtctttagccgtttttttagcaacaatattggcccatttacgtcccactggaatgatctcctcgaaaatttatttacattactggtaaatcgttaacatgtgttaattcggcatattatatcataacaggaaaaatctcgtctattagaaataaaaatattctaaagccataattttataaaaacttatattgttggcgggattttttataattgtgttttgaaagcatacttgcttttaatatgtggaaatcattaagacgataataaaactcgtatccgcccaaggaagcaaacagcccacgattattgcaggctatttgccaggtgtcttacttactccttcacatctatttctgataagaaggttcagaacttattatcggaacggcggctcattaaaggttcgtaatttacgcgaatgcagtcggtcgccttctgcgcgcagcaaatcgatcgcccgaatgtcaatttgcagatgttcggaaatagcgccttcataaaaacggttagcctgaccgggaagtttaatctcaccatgtaatggtttatctgaaacacacagtagtgtcccgtatggcacgcggaaacgatatccttgcgcggcaatggttgcactttccatatcaattgctacggcccggcttaagttaaaacgaagtgcagaagctgagtaacgtaattcccagttcctgtcatctgtggttaccacagtaccagtacgtagccgctgtttgacttcctcaccgggcctgccgctcaccagcttggtggcgtcataaagcgcacgttgcacttcagcaatgctcggaataggaatatcgggcggcagaaccgcatcaagaacgtggtcatcgcgtaaataagcgtgtgcaagtacataatcgccaatggcctgactttcacgtaatccgccacagtgaccaatcatcaaccagacatccgggcgtagcactgccagatgatcgcagatggttttagcatttgatggtcccacgccaatattcaccagagtaataccctgagcatcggcggtaattaaattccatgctggcatctggtgttttttccatgcaaggtcggaaatggcttcttctggcgcttcggtttcggcggtgatccagttcccgccagcacaagaaagggcaatgtaaggactatcaggatcgaggatctggctgcatccccaacgaacgaattcatccacataacgtgtgtagttggtaaacaagacgaacggctgaaaatgttcaactggcgtaccggtataatggcgcaaccgtgcgagggaaaaatcgacgcggcgcgcatcaaaatgcgatagcggggagaattccgttggatgataaatgccgtctgcagtttcatcgccaatttgcgccagttctgttgtcgggaagtagcgagttaacccagcgctcattgagcgatcaagtgtcaattcagagccatcgatgacataaggataagggatttcatgctgcgagggttgcacagagatatgcgcaccataatcctgatacagcaacgtaagttgttcattaagatacgaacgaaagagagtagggcgagtaatcgtggtggtgtagctgcctgcgtgagtaaaacgaccaaatgcgcgcgttttggggggattggttgtgctaccgtcccaggttacggtcagtgatggatagacaaaaagaccttgtttgcgggcgttttcatcaggtaattcgccacttgtaatatagttgccaatggcgttgcgtaatgcgactacagattgctcatacagcgcgtcgagtttatccagtgcctgagctggggtcagaccggagcccttattattcatgtgtgtctcctgttccatacaattaccgcacatccgatagtatgtcacagaaatgtgaaacaaaagtgtaaggcgaagatcggatgatcttcgccaggctatcaagcgcgttgactgtctttcatcaacaaagcggtcattgcggaaatcaggcatccagccagcaaataaatggcgacgctatgccagttcccggcaaagtaagtgatgagtgcagcggcaataaaaggtgtaaatccaccgccaaccacactggcaacctgataaccgactccagcgccactatagcgataactggcaccaaacatttcggtaaacatcggttgttgcacacacaccaccatgtcatgcgcaatgtttgccagcattatggagaagaaaactatccagaaaatagattgtgcttcaagcgccatggtaatgactctaacttattgatagtgttttatgttcagataatgcccgatgactttgtcatgcagctccaccgattttgagaacgacagcgacttccgtcccagccgtgccaggtgctgcctcagattcaggttatgccgctcaattcgctgcgtatatcgcttgctgattacgtgcagctttcccttcaggcgggattcatacagcggccagccatccgtcatccatatcaccacgtcaaagggtgacagcaggctcataagacgccccagcgtcgccatagtgcgttcaccgaatacgtgcgcaacaaccgtcttccggagactgtcatacgcgtaaaacagccagcgctggcgcgatttagccccgacatagccccactgttcgtccatttccgcgcagacgatgacgtcactgcccggctgtatgcgcgaggttaccgactgcggcctgagttttttaagtgacgtaaaatcgtgttgaggccaacgcccataatgcgtgcagttgcccggcatccaacgccattcatggccatatcaatgattttctggtgcgtaccgggttgggaagcggtgtaagtgaactgcagttgccatgttttacggcagtgagagcagagatagcgctgatgtccggcagtgcttttgccgttacgcaccaccccgtcagtagctgaacaggagggacagctgatagaaacagaagccactggagcacctcaaaaacaccatcatacactaaatcagtaagttggcagcatcacccaattgccactgccttttttccatcactggggaactaatcactgacattaacaactctttcactgcctgtgcctgtggcgataagttcgctctggcgggtaaatttaatgacaaagagagactcatggaaggagtggtaatgcgtgacatccacccatttactgcgccacataacgaacgcgcggccgattcgggtaatactgcaacgcccatgccgctggcaatcgctgcggtaagcgtggcaatagactcaatttcaccaatgacttttgccgtgaatcgccgtaaggaaaaagcctcatcaacacgaagtctaatagcactgtaatcactggggagaaagaggttcattttcgcaatagcattcacatcaacgctttgccccgggcaatcttgagttcctaccagaaaaagatcttctttcagcaaagcctgactggatacaccagccacaggggaatgctcataaatcaccgccatatcgagttggtgatttatcaatttttcgttaagcactgcaccactattttcatgaagatagataacgatctccggaaattcagcgcgaaccgcctgtaataagggcatggtgatggatgacgcagcggttcctggtgcaaagccaatcgagacttgccccgataatgcctgaccaacgttatgcaccgccagttgggcctgttcacactgacgtaaaatggcccgcgcatgggtatagagaatttttccggcgtctgttggcgtaacgccccgctttgtacggatcaaaagttgttgatttaactcaccttccagtgtggcaacctgctggctgagcgctggttgtgcgatatgcaatacttcagcagcctgggtcaggctaccaatatctacaatttttacgaagtatttcaggcgtctgaagttcatgttgcctccggtttttaagaatcggcccaagtgccgccattacttacaaccagattgcaagatgcttgccagttttattttggcgttgatgtacaagctaaccaactgtcaaataagagattatgatagattcgtcatttgctcctttaatcagctgtcgcgttcccctgccctataaaaggagggtatgcaccacgatggttcattacccaataagattgaaagctcaccactttgttgaaattgacagcaaacaaacaaaaaaatgcatttcaccctttgacatcaccatgcactgccattaatatgcgccccgttcacacgattcctctgtagttcagtcggtagaacggcggactgttaatccgtatgtcactggttcgagtccagtcagaggagccaaattcaaaaaagcctgctttctagcaggctttttgctttctaattaccaacgctcttaaaacatctgtcttgaaccagaactaatttgcacaggcattcccgatcgacgttgcaacgcagcatttgcgcgatttacatcaacttcttgcccgctgataaacgcccgcaaagatggggttaccggcaatggcacttttcggtcagactcatattctgcacgattgcgcgacaacggctcatgaacttccagccagttcgagccatctggttcagtggtgtattttactggctggtcgataatttgcacacgcgtcccaacaggaacattatcaaacagatatttgatatcgtcattgcgcagacgaatacagccctgacttacccggagcccaataccaaaattggcattggtaccatggatggcatacaacctgccaatataaatcgcgtacagccccatgggattatcggggcccgcaggaacaaatgcgggcaaactctcccctcgtttcgcatattcgcgccgagtgttcggcgttggcgtccaggttggagcttcttgtttacgttcaacggtagtcacccagttacgcggggtttctcgcccagcctggccgataccaataggaaagacttccacagtattactgtctggtgggtagtaataaagacgcatctcagcgacgttaaccacaatccctttacgaacagtggcgggcaaaatcagttgctgcggaatggtgagttgcgagccagacttcggcaaaaaaacatcagcgcccgggttcgcttccagcatgttacttaacccttgcccgtattgtgcggcaaaagtctccagcggctgggtattgtgatcaggaacagttacagtaagcgactgccccactaaacggctaccctctggaggtaatggataagttaccgccaggctattatggctggcaaaaagcagagcaaatgagcaaaaaatatttacacgacgcatcatgtccctttcctaagtcgcgaaagctatccgttaagtatagcttttatcagacttttcgtttttaactgttcaaatcagaagtcgtattccccggtagaacaatattactggcagcaagttcgcccatgttgttatatatcgcacaggcagcttcgatgatgggcatcgccagagctgcgccactcccctcacctaaacgcatctccatattgagataaggctccagccccaaatgcgacagcgcaatacgcgcccctttttctgccgacaggtgagaaggaatgagatacggtttgattgcaggagacatctggcaggctgcgagcgcggcagcataagaaagaaatccatccagcaacacgggtaaaccgcaggaagcagcgcctaacatcacgccagccattccgaccaaatcaaatccacccacttttgccaggacatcaacgccatcctgcggatttggttgattcaacgtaatcgcccggcgcacaacatcaattttattagccagtttatctgtcggcaggtttgcgccaatcccaaccacttcttcaggagcccggccagtgattgtgctgactattgccgctgccggtgtcgtgtttgccatccccaggtcacctacaccaaacagcgtaacaccgttttttgccagctcccgcgtataacatatgacgtccaaaagcaacttttctgccagatggcgactcattgccggagctgaagcaatattgccactacctcgagcaacacgcatgttgataagcccggggataggctcagcagtatcaataccaacatcaattacgtagacgttagcgcccgcttgtgctgccagcacacacacgccggttgttccgcgggtcatattttcagcctgaatggctgtcacttcttttggggaaatagcgaccccttcctcccagacgccgtgatcggcacacatgaccagtaccgcttttttgcccacatgcggaacgccattcaaccccggcattcctgccagttgtatggcaagcgcctccagccttcccaggctaccaacaggtttgagtaacccgtcgatatgccgttgtgcacgcgacatagcggcaggatcaatagcagggatcgtattcagtaaatcggcaagtgtttgcatgtcacgtctctttatagcagtgccagcaggaagaccagttcaccaagctctatagcagctcccagcgtatcgccggtttgcccgcccagcgtacgtttgagaagctgaccgaggatgaaaatcgccaccatcgtcaccaccatagcagccacaccatgcatacccggcaataatacggcagcaaaaatagcggctaagccgagtgtgacgcaggtttgtcgcccatcaattttgccaatgaacacattgccaagtccttcttcccgggcataacgatgacgatacatcaataatgcggcagtcccgcggctgaccgcacatgctgccgccagcgatgcaaggatcggttcgccacgcagagccaactcgcttaataccagaatctttgccagtacaacaaaaatcaatgccagaccgccgtgggtgcctaaacggctatcacgcatgatttccaacatgcgatcgcggctacgtgcagaaaatacgccatcacaggtatcggcgaggccgtccaggtggaatcccccggtcatcagcgccagcacaagtacgctaaacagtgccgccagtggtacgccacaccatgcctgcagcaccatgaagaccagcccgctaatcgcgccaagcaataatccaattaaaggaaaagtaataataccgcgagaataatgctcgaaatccagtccctgggaccagcgacgcggtacaggcagacgcgtaataaaagagagcatcgcccaaaataatttactcatttgatttttactccaatacccgaaaccaccaaccatacttcatttgccgcagcggccagctgctgatttacccgcccggcaatatcacgaaaatgtcgtgccagacgactctccggcacaatccccattcccacttcgttagtcactaatacaacctttgcgggacaacgttggcaggcagcaatcaacgactgaatctcagcattaatcgcctgttccatcgcctgataatcccattcatcagggtctttatcgccgccataatcaaacaacagattagtcaccatggtggtaacgcattccagcaatacagcctcatgcgggttaatgtctgcatgaattaattcatcaagatgttgccagcgctccactgtgtgccagtgcgccgggcggccttgccgatgatgttctatccgtgcagccatctcatcatcaaggatttgtgaggtggcgatatacagaacctgcgaagagtccccaataagcgcctctgcatggcgactcttcccgctccgtgcgccccccgtcaccaaaatcatcataccgactcctgattcaattgtatgatggtattcattgaacagaacaatggatcccccaccgttgctgaccgcaaaacatttacgcgattaatactgcgcgtaatataattaaaaatccagcattctcaatccattacgaaagaagatggcattgcggaatagccagacttcctcgtgttaacgtccgacaaaatgcgtcattgacagcggtttctctggaatgacagatttcattcagataatggattaatgctacagccccaccagccggaccagtcagcaaacgggcattgtgttctgcaatcaaaattaccgtcgttccctcagaatgagcgagccattctggtacggatatctcgctttcagctgctatcaatagcagcactgaataatcgctatacgcatctgataacgattgcacaggcccaccatcaagaggctggaaatcttgctgccagtcctcaccaacaaaacaggttattggcaatatttcagccagatgtttcgccagatccacatctccagataagaggcaaaaaagagctatcgattcgggttttatcgttttcatgcctctcgccctccacttaatttcctgtaatggcggtctggttgataagccatgaaacaatattgccacaccttgaatgcagccctggtgcctgtcggcactgcgatgaaagaactaaatgatgccgccataccctgatcctttcagggtggtaggggtataaagacgcgccagtactctaccggacgcttccgggcaacccacttcccaccgaagttgttggtattgactgacagactggtcttctggcttagcgtcatcctcacccgaccttcccaatctcgcgatcagtggcattttcgggtttgtcagcattacagcagcgggggctgcgagggattttcaccctcttcccaggcacaaatgtgccacacctgtcagcgtatgttatgagctgatttcacttttcccataacacgtaaataacgttaattattcattccagcgtttatttaaaccttccctttttttagcatttattctataccgtttccatcgccgcattttcactcacttgctgtcgatacacctgcggcgtaacctgataagtctgacggaaaactttgcaaaaataactgtattgtcgtggggattaggcgcacgagtctggcgcaccgaatctgaccgagatttgttctctttaataaccacaaaattgagttgttttttgaggcaattttccacaatcaacttcaacaaatcagcagaggccataactcttgagtaatccatctcaggaactttgcggaattcattaagtaattcgggatctgcctgccagcaatcatcgacattcagaatatcgaccaaatcgacatcatcattacgcagacgaacttgcccgcacaatacaaaaccgactaaatgtccggcgattaccagtggaatagagaaatcggttaatccggcatgacagcgataaatacaaggctgatcggatttagaggcttccaggcccccacaacgatcgctcatgcgacatcgagtgcttagctgagggtgttgccgcatcatctgacaaaatggagtgaagttaaacagctcggaaatttcatcgccgtgaatattgaccacgacaaccgcaaggctggtcgcctgcgcaaaatcctgcgcgattttattaatgagttctgaattaagtgtcgccgcagaaatcatgataaaacctcccagttaatttattgttatagcaaaacaattgttttacatttaatcttcacatcatccctgatgatttactgacgagaagcacaaaggacaataacaaaagcctccgtgaagcgggagactttttaataagttcggaaagcagatcacaaacagtaaaaaaataaatgtttataactgccagagtatttcgttattcgctaattcctttaggtgtaacactattgacaggtaaattctttgcaatgagatagcgataaatcgccgcaccaacacatgccccaatgatcggtgcaataatgggtacaatgaaataaggaatattgcgtccaccagtcatcgcaatttctccccaccccgcaagccaggtgaaaatcttaggtccaaaatcacgcgctggattcatggcaaaaccggttaatggtccggtagaagcaccaataacagcaaccagaataccaataagtaaaggtgcaagcggtcctttgggtacgccattaccgtcatcggtcaacgccataatcaaccccattaacatggacgttatgaccacttcgaccaacgcagcttgccatacattaatcgccgctgccggataagtactgaagatactggcgagttgtaaactttctgcgctaccacgcaccatattgtgagcagattcaaaatcggtaaacagactactgtatagagaatatgccagaactgcaccaccaaaggcacccgctaattgcgccagacaaaatggcagcactttacgggctgggaaagaggcaaacagccacagagcaatggtaactgccgggttgagatgagcgccggaaatacctgccgtaaggtaaacagcaagcgaaatccctaacccccaaatgatacaaatttcccacagtcccagacttgccccggcaactttcagggcgcacaaacaaccaatgccaaaaaagaggaacagtccggtgcccaaaaactcggcaacgcattgcgccttgagtgaatcattcatagtgacaccttttttacggagtttttctttatcagccaactatgcgctgactgttgtatataccgagcacaactataaaaaattgctctgcagaaaatattgccaacatgcatgacagactcgtgtaaaaatcgtgctaacataacaaattattgtcattaccgaatcatgcaacacagcgttagtcagtgttgaaagtaataattcccaccaaacttttacaataaaaaattgccatcatgacataataaaattgaaacaaatatcacagttccttcttcgaactaaactcaaccaaatattactcgcgattaaactcactagccaacgcaattaattcacattgaaatatccacaaaacaaccaataaattaacaacatatagttcataaaagcaattttataatatttgttctctattaatttctctcattagccgattaagtcagccattctttttcctcgcttttttttatagtcatatcgtcaaaaaaatccaggcgaggtctttatgcaacaagaagcgttaggaatggtagaaaccaaaggcttaactgccgccatagaggccgcagacgccatggtgaagtcggcaaatgttttgctggtcggctacgaaaaaataggttccgggctggtgaccgtcatcgttcgtggtgatgtcggggcggtaaaagcggcaacagacgcgggtgccgcagctgcgcataacgtcggcgaagtaaaagccgtacacgttattccccgcccacataccgatgtcgaaaaaatcttaccaaagggaattaacccatgagcagcaatgaactggtcgaacagatcatggcgcaggtcatcgctcgcgtagcgacgccagagcatgaggttctcccgaaaaccactcatcaaatacgatagacggctatggcagaaaaaagctgcacgctaacagaatttgttggcaccgctattggcgacactgtaggtctggtcattgcgaacgttgatagcgccctgttggacgcgatgaaacttgaaaaacgctatcgttccattggcattctgggtgcgcgtattggcgcagggccacacattatggccgctgatgaagcggtaaaagccaccaacactgaagttattagcattgaacttcctcgcgatactaaaggcggtgccggacacggctcactgatcctcttaggtggcaacgatgtttccgacgtgaaacgcggtattgaagtcgccctgaaagaactcgatcggacctttggcgatgtctatgccaacgaagccggacatcttgaactgcaatataccgcccgcgccagctatgcactggaaaaagcgtttggtgcaccactgggacgggcttgcggcgttattgtcggcgctccggctgctgtgggtgttctgatggccgacaccgcgctgaagtccgccaatgtggatgttgtggcatacagctccccagctcaaggcaccagctacagcaatgaagtcattctgattatctcgggtgactccggcgcagtccgccaggcggtcatctccgcacgcgaaatcggtaaaaccgtgctttcgactctcggcgatacaccgaaaaacgatcacccttcctacatctgaattctctgaggcagatttatgagatcgaaaagatttgaagcactggcaaaacgcccggtcaaccaggacggtttcgttaaagagtggattgaagaaggctttattgcgatggaaagcccgaacgatcctaaaccgtcaatcaaaattgttaacggcgtcgttaccgaactggatggaaaacccgccagccagtttgacctgatcgaccactttatcgcccgctacggcatcaatctcgcgcgcgccgaagaagtcatcgcgatggattcggtaaaacttgccaatatgttgtgcgatccaaatgtcaaacgtagcgatatcgttccccttaccacagcaatgacgcctgcaaaaatcgtcgaagtggtttcgcagatgaacgtggtagagatgatgatggcgatgcagaaaatgcgcgcccgtcgaacaccatcacaacaggctcacgtcaccaacgtcaaagataacccagtacaaattgccgccgacgcagctgaaggcgcatggcgcgggtttgatgaacaggaaaccaccgttgccgttgctcgctatgcaccgttcaacgccatcgccctgctggtcggctcacaggtgggacgtccgggcgtcttgacccagtgttcactggaagaagccaccgaactgaaactcggtatgttaggccacacctgttacgccgaaacaatttctgtctatggtacagaacctgttttcaccgatggtgatgataccccgtggtcaaaagggtttctcgcgtcatcctatgcttctcgtggcttaaaaatgcgctttacttccggctccggctctgaagtacagatgggttacgcggaaggcaaatcaatgctttacctcgaggctcgttgcatttacatcaccaaagccgcaggcgttcagggtctgcagaatggttcggtaagctgcatcggtgttccatcagctgtgccatcaggcatccgcgcagtattagcggaaaacttaatttgctcatcgctggatctggaatgcgcctccagtaatgaccagacctttacccactcggatatgcgccgtaccgcacgtttcctgatgcaatttctgccaggcaccgactttatctcttccggtttttccgctgtgccgaactacgacaacatgtttgctggttcaaacgaagatgctgaagacttcgatgattacaacgtcattcagcgtgacctgaaggttgatggtgggctgcgaccagtacgcgaagaagatgttatcgctatccgcaataaagccgctcgcgctttacaggctgtctttgccggtatgggactaccgcctattaccgatgaagaagtcgaagcggcaacctatgcccacggttcaaaagatatgcctgagcgcaatattgtggaagacatcaagttcgcccaggagattatcaataaaaaccggaacagcctggaagtggtgaaagccttggcgcaaggcggttttaccgatgtcgcccaggacatgctcaacatgcaaaaagcaaaactgaccggcgattatctccatacctcagccatcatcgtcgatgacggacaagtgctctctgcggtcaatgacgtcaatgattacgccggaccggctacaggttaccgcctgcaaggggaacgctgggaagagatcaaaaatattcccggtgcacttgatcccaacgaaattgactaagggtgagaaatggaaattaacgaaaaattactgcgtcagattatcgaagacgtgctggcagaaatgcaacccagcgacaagtccgtttcatttcgcgcacctgtctctgcaactgtcccttccgcgccagataccggaaattttctgaccgaaattggcgaagcccaacaaggcactcagcaagatgaagtcattattgctgtaggcccggcgttcggcctggcgcaaaccgtcaatatcatcggtattccgcataaaaacatcttgcgcgaagtgattgccggtatcgaagaagaaggcattaaagcccgtgtaattcgctgctttaaatcgtccgatgtcgcattcgtagcagtcgaaggcgatcgtcttagtggttcaggtattgctatcggtattcagtcgaaaggcacaacggttatccaccagcagggacttcctcccttgtctaacctggaacttttcccacaagcgcctttgttgacgctggatacttatcgtcagattggcaaaaacgccgcgcgttatgcgaagcgcgagtctccacaaccggtgccgaccctcaacgatcaaatggcgcggccgaaataccaggccaaatctgccattttgcatattaaagagacgaagtacgtggtcactggcaaaaaaccgcaagaactgcgcgtgacgttttaacaaaggaaaccttcatgaataccgatgcaattgagtcgatggtcagggacgtgttgaaccgcatgaacagtttacaggatgcagctcctgtttctgcggtccccaacgcatcaatactgagcgccaaagtgacggattacccgctggcaaataaacatccggaatgggttaaaacagcgaccaataaaacgctcgacgatttcactctggaaaatgtgctaagcgataacgtcaccgccctggatatgcgcattacccctgaaacattgcgtattcaggctgcgattgccagagatgctggtcgcgatcgtctggcgatgaattttgaacgcgccgctgagcttacctcagtaccagatgatcgcatcctcgaaatctacaatgcgttacgcccttatcgttcaactaagcaagaacttattgccattgctgacgatcttgaacagcgttatcaggccaaaatttgtgctgcatttgtccgtgaagctgcggaactttatgtcgagcgcaaaaaactgaaaggcgacgattaaggacgaactatgcgatatatagcaggcattgatatcggcaactcatcaacagaggttgcgctggcaacgctcagtgcaactggagagttgtcgttcgtgagtagcgccctggaggaaaccaccggaatcaaaggtacgttgcgtaacgtccatggtattcaggaggcgctcgcacaggcaacgaaaaaagtcggcatcaatgttagcgatatttcgcttattcgtatcaacgaagcaactccggtcattggtgatgtggcgatggaaaccatcactgaaactatcatcaccgaatcaaccatgatcggtcacaacccgaaaactccgggcggagtggggctgggcgtagggttcaccatcactccgcaagagttattaacacgcccggcggacacaccttacatcctggtggtgtcatcggcatttgattttgccgatatcgcgacgatgataaacgcctccgtacgcgccggatatcagctgactggcgttattctgcaacgcgacgatggcgtactggtcaataaccgcctggaaattcctttacctattgtggatgaagtcctctacatcgatcgtattccgctcggcatgctggcagcaattgaagttgccgttcccgggaaagttatcgaaaccctgtctaacccgtatgggattgccaccgtattcgccctcaatgctgaagagactaaaaatattgttcctgtcgcgcgggcgctaatcggcaaccgttcagcagtggtagtgaaaacgccctctggcgacgttaaagcccgttcgatacccgccggaaatatcgaactgctttctgccgggcgcacaacgcgcgttgatgtagctgctggtgccgatgccattatgaaagcggtcggtgagtgcccaaaactggaaaacgtgacgggagaaccaggcaccaacatcggcggaatgctggaacatgttcgccagaccatggcggaactgaccaacaaacccagcaacgaaatttttattcaggatttgctggcgatagatacctctgtccccgtcagcgtaaccggtggtctggcaggtgaattttcactggaacaggctgtgggtattgcctctatggtgaaatccgaccgtctgcaaatggcgatgatcgccagtgaaattaagcaaaaactgcatgttgatgttcaggtcggaggcgcagaagcagaagccgccattcagggggccttgactacccctggaaccacacgtccactggcaattctggacttaggtgcaggctctaccgatgcctccatcatcaatcagagtggggaaatcgttgccactcaccttgcgggagcgggcgacatggtaacgatgattatcgctcgtgagctgggcttaaatgatcgttatctggcagaagaaatcaaaaagtacccgttagcaaaagtagaaagcctgttccacttacgccatgaagacggtagcgttcagttcttccctactcccctatccccccatgtatttgcccgcgtctgtgtagtgaaacccgacgaactggtgcctattcccggtgatttgacgctggaaaaagtacgcgctgttcgtcgcagtgcgaaagagcgtgtcttcgtaaccaatgccctgcgcgcgctacgtcaggtaagccctgccggaaatattcgcgacattccgttcgtcgttctggtgggtggttcttcgctggatttcgaagtaccgcaattggtcaccgacgcgctggcacattatcgactggtcgccgggcgggggaatatccgtggtagcgaaggtccgcgcaacgcggtagctactgggctactcatcgcctggcacaaggagtcgattcatggaaagtaaagagcgtgcaccagccatcgttgtcatggagatcggtgactgtatcactacatgggatgaggtgcttcttggcattgaagaggaaggtattccctttcgcattcaacacattccgtcaggtgaagttatcgatagcgcctggctggctgctcgtcaatctcccctgttggttggcattgcctgcgaccgggaagaactgattgtgcattacaaaaacttaccggcatcagcgccactgtttacgctgacgtatcaacaagataaccatacccggcgcagcatcggcactaacgctgcccgcctggtaaaaggaattcccttccgggaattccactcataatccacaggagaaacgctgtatgaacaacgcactaggactggttgaaacaaaagggttagttggcgcaattgaagctgcagatgccatggttaaatccgccaacgtgcagctggttggctatgaaaagattggttcgggtctgattacggtgatggtccgcggtgatgttggcgcagtaaaggccgccgttgatgcggggagcgctgcggcaagcgccgttggcgaagtgaaatcctgccatgtcatcccgcgcccacacagtgatgttgaggctattttacctaaatcggcataaccccatttgctaaggagcacagcgtgaagcaatcactgggattacttgaagccagtggtctggctctcgccatcagttgcgcagacgctatggcaaaagccgcgtccatcacgctggttggccttgagaagaccaatggctcaggctggacgctcatcaaaatcaccggtgacgtcgcctcggttaatgcggcgatcgcgacgggagccagtttcgccggacagcgaaatggccttgtcgcacacaaagtgattgcccgcccgggagacggcattctgccccacacaactgaagcattgaccgtgacggttgaaacaagcaaaacaccagcaacaaccgtcacctcagagattatcagttgtaatttgtgtcttgacccggcatgtcagcggcaaaaaggtgagccccgctcactttgcctgtacgccaataagcgaggggagtagcagtggataaacaaaccttgcaggaaacagtgagccagattctggatgagatgcgcgagcgccctatcccactgggcgtttccagtcgccatatacatctttcatcagcggattatttgcgtctttttcctgaacaaccgattagcgagaaaaagccgttaatgcaacctggccaatacgctgctgaacaggttgttacgctggagggaccaaaaggcaaattgcacaacgttcgcttgttggggccgctacgcaatgcaagccaggtggaaatttcccggacggacgccagaacgttagggatcaccgccccgctacgcatgtcaggcgatctcagcggcactccggggattcgtttgataagcccatttgcggaactggagatcacatctggcgtcattgtcgcgcaacggcatattcatatgtctccgctggatgccctgatttatggcgttacgcatggcgataaagtggcggttgccattgaaggtgatgagcgacgactgatattcgaaaacgtcgctgttcgcgtctctccggatatgcgtcttgaaatgcatattgataccgatgaggccaacgccgcaggcgctgatagccctgacgtttttgccacactggtgtcagtgccatgaataacatgctgatgcaacgtattgttgacgaagtggtttttcgccttaaacaacgtgcgggaaaaacactcgtgctgactgtttttcaattgcgagacgccagcgttcaagagagcgttcatcagtatgcgtcattacaaatccgatatgtcgatctgccgctgctgcgacaacttgcggagaacgaaacgtcagatcgagcatctatccagatacacgaagcgttagcctggggaatgcacattcaattgtcgttgcagcgtcatttcctgaacgccatcgaattgaagactctcgcccgtctaccgctaagctggtgcgacgaacaagggcagccgatctaccttcatcataatcgacttttaagttatgccgatatcgcacagttaagctcgggaatactggtgttacagcggaaatgttgtgtgaccgcactggctcgtgaagcggcaattacccgaaatattcagttaatcaggcaggagtaacctatgcatctggctcgagtcactggcgcggtagtatccacgcaaaaatcaccttctctgatcgggaaaaaactgctgctggttcgccgggtcagtgctgacggcgaactgcctctcacgccattaaccggcgacgaagttgccgttgattcagtcggcgcaggcgttggtgagttggtactcctcagcagtggttccagcgccagacatgtgttttcaggccctaacgaggccatcgacctggcagtggtcggcattgtcgatacgctttcgcgctaaggagctaaaagatggcaatttatacccgaacaggtgattcaggaagtacgtctttatttaccggacagcgcgtcagcaaaactcatctacgtgtcgaaacctatggcacgctggatgaactgaacgcgacactcagtctgtgttattgcgccaccgccatcgaaagccatcgcatcttactggaagccattcaacaacagatattttggtttagcgccgaactcgccagtgaaagcgaacagccgtcagcgcaacagcgttacatcggtacggaagaaattgccgcgttggaaaacgcgatcgatagtgcaatgaacgccgtccccccagttcacagcttcattctgcctggtcgatgtgaagccgcaagccgcatgcatttcgcccgcacggtggctcgacgggctgaaagacggctggttgaactgacaacggaaaccaccgtccggaatgttttgctgcactatatcaaccgactttccgattgcctgtatgccctcgcccgcgtggaagacaacgttgctcatcaaaacctgatgattcaggaaatcacaaaacgttatcacgaagccaaccacacaccagcattgaaggaacgcacaatgccgctcacttttcaggatcttcaccagctcattcgtagtgcggcaatgcgcgcggatgaactgcatattcccgttgtcatcagcattgttgatgccaacggaacagaaagtgttacctggcggatgcctgatgccctgttggtcagcagtgaactggcaccgaaaaaagcctggaccgccgtggcgatgaaaacggcaacccacaagcttgctgataccgtgcaacccgacgcgccgctttacgggctcgaaagccatatgcaaggaaaagtcgtcacttttggtggcggcttccccctctggcgtgacggaaaattgcttggcgggcttggcatcagcggcggtagcgttgaacaagacatggatattgcccaaagcgcaatggcggcaattaacgtgggagtaaaccaatgaataactctgaattagaaacactgatccgcaatattctgcgtgagcaacttgtccccgctacaccacgaacgcaaagaaacgctattttccagactgtcgatgaagcggtctgcgcagcacactaggcctttttacgctttcaacagtgcccgcttaaaacccgtagcgccattatcagcgccattcgcgaagaattaatgccccgccttaccgaactggcagaagaaagcgccaaagaaacggggatgggaaataaagaagataagtacctaaaaaacaaagcggcactcgataacacgccaggaattgaagatttaaccaccacagcactaaccggtgatggtggcatggttttgtttgagtactctccgtttggggtgattggctcggtcacgccaagcaccaaccccacggaaaccatcattaacaacagcatcagcatgctggcagcaggtaatagcgtctacttcagtccacacccgggtgccaaaaacgtttcgttaaaactgattaccacaatcgaagacatcgcgtttcgctgtagtggcattcataacttgatcgttaccgtatctgaaccgacctttgctgccaccgaacagatgatggcgcaccctaaaatcagcgttctggcgattaccggcggtccggggatcgtcgccatgggaatgaaaagtggcaagaaagtgattggtgccggagcgggtaaccctccgtgcatcgtcgatgaaacggcggatattgtgaaagccgccgaggacatcatcaacggcgcttcatttgattacaacctgccgtgtattgctgaaaaaagcctgattgtcgtggcatcagtggcagattatttaattcagcagatgcaaagttttggcgcacttcttcttaactatgagcaaactgagaaattgcgtgcaatttgcctgccagacggtagcgccaacaaaaaactggttgggaaaagcccatcagccttgctggaagcggcaggcctccctttgcccgcaaaagcgccgcgcctactgattgctgttgtcgacgccgatgatagttgggttacttgtgagcaactaatgccaatgctgcccattgtgaaggtcaaggattttgacagcgctctaaccctggcgctgaaagtggaagacggcttgcaccacacggcaattatgcactctcagaacgtctcacgactcaaccttgccgcgcgcgttatgcaaacctcaatatttgtcaaaaacggcccctcctgggcgggtattggcgtcggcggcgaaggctttacgacctttaccattgcaacaccgactggagagggtacaacgtcagcacggacttttgcccgctcacgacgctgcgtgttaaccagcggcttttcaattcgctagagaaacggaaatgaatactttttcactgcagacgcgtttatacagcggaccaggaagtctcaaggtacttagccgtttctctcatagacacatctggattatttgcgatgcctttctggcacgctcaccacttattgacacgttgcatcaggcgctgcccgacagtaatcgtctcagtatttttagcgaaataacgcccgccccaactatccagaccgtggtgaaaggcattgcgcaaatgcagactttacgcccggatgtagttatcggttttggcggcggttctgccctggacgccgcaaaagcaattgtctggttcggtcgccagtgtggcattgaaattgaaacctgcgtagccattcctaccaccagcggtatcggttccgaagtgaccagtgcttgtgtcatcagcgatcctgagaaagggattaaatatccccttttcgataatgcactttatccggatatcgcgatccttgatccatctttggtcgtcagcgtgccaccggcgataacggccaataccgggatggatgttttaacccatgcgcttgaagcttatgtttctcctcgcgccagcgacttcacggatgcactggtcgaaaaagccgtgcaaattgtttttcaatacctgcccactgcagtgaaaaaaggcgattgtcttgccacccgtggcaaaatgcataatgcatcgacgcttgcaggaatggcctttagccaggccggactcggtttaaaccatgcaattgctcatcaactcggcggacagtttcatctgccgcatggactggcgaatgcgctcctgctcacggcagttatccgctttaatgctggcgatccgcgcacagccaaacgctatgcccggctggcgaaaacgtgccatttatgcccggacaacgccaatgacaccgccagcctgaatgcacttattcaacatattgagcagcttaatacaacctgtacgctgccgactcttgccaatgcgctgaaagaaaaaaaagcagaatggtcaatacgcataccagatatggttcaggcggcgctggcggatgcaacgttgcgtaccaacccgcgtgcagctgatgcctccgcgattgcagaactgctcgaggagttgttatgaacgtcggattaatctcctgcgacgaccagaccatccgcgagcgagtacaagcagcaggtgtcgtgggtgctggcggcgcaggttttccaacccatattaagctacaagcgcgtgctgacactttcctggtgaatgcggcggaatgcgaacccatgttgaaagtagatcaacagttaatggcgcagcaagccagccgcctgcttcgcggtgttcactatgcgatgaaagccaccggggccagtagcggaatcatcgcgctgaaagaaaaatatcaacgggcaataaacgcactcacaccactgttaccaccggatatccgcctgcatattttgcccgacgtttaccccgcaggagacgaagtgctgaccatctggatggcaactggtcgccgcgttccacccgctgcattacccgttagcgtcggtgtggtggtcaataatgttcaaaccgtacttaatattgccagagccgtcgagcaacagtatccagtgacgcgccgcacactcaccgttaatggtgcagtggcgaagccaataacggtaaccgtccccatcggcatgtctttacgtgaagtcctggcgctggcgggcggcgcaacagtggatgctcctggttttatcaatggcgggccgatgatgggaagtttgatcacatcgctcgacacaccagtcagcaaaaccactggcggcttgctggttttacccaactctcattcactgatccaacgtcgaatgcagaatgaccgcagcgtacttgccgtcgcgaaaactgtttgtgagcaatgccgcttgtgtaccgatctctgcccacgtcatttaatcggtcacgaactggcaccccatttattagtacgtgcggttaactaccaacagctcgccacgccgcaactgttactgacagcgctcacctgttcagagtgcaacgtctgcgccagtgtcgcctgtccggtaggaatttcaccaatgcgcataaaccgcctgcttaagcaggaattacgcgcacaaaatctccgctacgaaggtgccttaaatcctgcagatcccatggcaaattatcgactgattcccgtaaaacggctggtaaccagacttggcttaaccccgtggtatcaggatgcgccattgtctgaacaggtgcctcagcccgaaaaagtgacgttattgttacgccagcacatcggtgccagcgcaattgcgtgtgtacaaaaaggcgatcgcgtcgttcatgggcaatgtgtaggtcaaattccacacggcacattaggtgcccccattcatgccagtattgatggcatggtcagcgatgtgacagaaaacgcgattacgcttgtgagaggttaaccatgtcgaaagcggtaggtattttagaacttagcagtatcgcgaaagggatggaaaccggcgacgccatgctgaaaagcgccaacgttgagttactggtcagcaaaacgctatgccccggaaaatttctgctgatgctcggtggcgatgtgggcgcggtgcaacaggccatcaacagcggagcgtcccttgctggtgaaatgctggtcgacagtcttgtcctgccgaatattcatcccagcctcctttctgcaatcagcggacttaaccatgttgaacagcaccgggctgtcggcgtagtcgaaacctggagtgtcgccgcctgcattgacgctgccgattgtgctgtcaaagctgcaaatgtcattcttgttcgcgtacatatggcttttggcattggcggtaaatgctacatggtggttgctggcgatatttcagatgttaataacgcggtctctgccgccagcgtgcgcgcgggggaaaaaggtttgttggtctatcggtcggtgattgcccgtccacatgaagccatgtggcgtcagatggtggagggataatgacaactcagcacacaactgaacggatgattcaggaatatgtcccaggtaagcaggtcacgctggcacatgtcatcgccaatccagggaaggatctgtttaagaaattgggtttaccagacaccatttccgctattggtattctgacaattacccccagcgaagcatctatcatcgcatgcgatatcgccacaaaatcaggcgctgtagagatcggttttcttgatcgttttaccggtgccgtagtgctgactggtgatgtttctgcgatcgaatatgcacttagccaggttacccgtacgctgggtgaaatgatgcgctttaccgcctgccccattacgcggacctgacgttatgcaacgtatgatgctcatcggccccagccagtgcggaaaaacgtcactcacgcaatgtctgcgtggcgaaaatattcattatcagaaaacgcaggcaatcgtctggtccccgaccaccattgatacaccaggcgaatacctcgaaaaccgcagcctctacagtgcactgttggtcagtgcctgcgaagcggacattatcgcgctggtgcttaatgcggacgcaccgtggtcacctttttcgccaggctttacctcgtcaatgaatcgcccggtcattggagtagtaaccaaagcagatttagccaacatggaacaaatatctttggtgaaatgttggttacgggaagctggagcgcacaacgtgttagtaaccagtgcggttaataaccatggagttgcagaacttttagccttgctgcatacagaagaaggctgtcgctaatttcgacaggttatcagatgggaatgatgacggtgatacacagaaaagaatcaatgagcaatgagggttgccgggcaaccctcattgaataaaacaggaattacttcgcttcgccgtttttcatttcgcccatagctttcagctttttggagatatcgcggcgttctttggagagctcggcatttttgatgatgtaatcgtcaacgcgatcttcatagtcacctttcatgctggcgatgatgccctggattgcttcaacgctcatcccaggcttgatgtaatcgctcaggttgtccagcagcaggacgcgcttctggttgtcacggatctttttctcaacgtcctgaatttcacgttgcagtttgttcttacgacggaacagacgaacaaattccagtacgtcctggaatgaaggcttggtagtttccatttttatacccctgataatgtgagagtcagattcgtttaagcaaccgctattcgttagggccaacattactcatagctgccgcagatgacaatgcttttatcccttttcactatcataccctttatccttgctgaatcgaagcagcagcaagatgattctgaagttcaggaattatttgcgcaaggcccggcaaatcagattcgatagcaactcaagctgatgcgccgtttccatgttcagccacacataaccatagattggtgtttccactaccttcaggtcatggtggttattgagcaactgacgcagctcttccacagcatcgttcaatttttccgtattggcaaaaaccggctgcggattaccttcgtacagcgcatgaacaaagctcagcagtatttgctgcatcatgtgctgggtatcacgaagtttttgcgcgttcaataacacgaaatggctggggcgcgtggcccagtacgcattgatttgcaactccagcatacaaaccagattgcggttaatggtctggataccttcatatatcgattttggaatacgggtttctttgctggcgggcgcaatcagcccacgcattttcacggcatcggtcaggagtttttgtagatggctttccagacgtgggcgttcgagtaagttcggtgagaatgcagattgatagacccgattatactcggtcagacttttcgccagttgaatgcgccagtggatgaacgcccgttgtggccagataccggtaaacaacattgccagtaaagagccgaggatcacatcgccgcttcgccataacgccgtatcaatttcacctgtcggggaaccaacaacaattgccagcgtcaccccaatcaataatccttgatacggtttcttgcccagcgccagccaaccgcaaagaaacatcgccgccgcgcaccagactaacatcagcggtaacgaaattaactccagttgcagagcgataagacctaaaatcgaacccaacaccgtaccgccaatacgttcgaaggcacgagggacaacgttaccccagaacgagattggccccataatcaccaccatggtgaccagcggccaggtgctttccgggatagtaaacaggcggataatgagaaaagtgagcaggaatgccagcgcgacccgagtaccatgcactatgcggtaatggcggtatacccggatttcaaacgggcttaatgacttatcggcacgcacgcagaaactccgtaatgaagattaaaagcgctcataactcatctgtcggccagaaggcgcgcctctgaattatccgacggacaaaccgggaacagtgtaatttcccggcaggagcgaaaaaattgaaaggcgcatcttactcttttcgctttcaaaaaaagagtggtcatcgcgttaacacaccgccctgagatgaattagtgatgttttggctgcaccgcaacatacatttcgatatcccagtacccatcttccgcgccattgttcaaataaacctcgaagcagggctttggtaacatttcataagcactgtcctgcaagaggctattaaagaactgataccagggtttagcaaaatcatcaccgactacacgagccaccgccaccgcatactgaccacctgaaatttctgtcagaatgacgccctcactgttttcgggaagcgtaaagttattcggtaccgtcacaacggtgtcgcagcgtaatttttcggcgggtgtttcatctggattgtcgtaatagacagcaacccactccttcggcacaatatttttgttatctacccacatcatcaactgctcaaagcctttctttaccgtctgttcccacgggccaacgagatggaaacctgcaacggtacgtttctcttcctgcgtaatctcgtagttcatgacgcctccattaacactgtttttatatacagcatagttgcaatattaaaaccacaaggaatgagtgttgattatgcgagcagactcgcactcctgccagtctgctgcaaaagaaaggtcaggccttatggtggaaataatcactcaggcgggaaaacatgccgccttccccgacagattccagggtaaccagcggccagtgcgccacctgtttatcacggtcgtaaagttcaatttcccctacccgctgatgggcgctaattggcgcggtgagctctttaccatcaagggtatatttggctttgatatgtggaatttcggctttcggtagcaccatccagaactcttgttccgttcctaggtcgatattttctttatcgccataccagatgcgttccgttccgacctttttcccacggtgcaaaatttgcaccgtagtaaagttttgttgcccccaacgcagtaattttcttgcctcttcctcacgaccttttgcactgtcagcccccattaccactgcaatgagacgacgctgcccatctacagccgaagcaatgagattaaacccggcaccagaagtatgacccgttttcaggccgtcaacattcatggttttatcccacaacaacccgttacggttttgctgggtgataccgttccaggtgagacttttctcactgtacatatgataaaactcgggctcgccgtggatgatagcgcgagaaagcacagctaaatcataagccgagctatgctggccaggtgcatccagaccatgcactgtttcaaaatgcgtatccttgagatgcagcttctcggcatagttgttcatcatttcaacaaactgccgttgcccaccggcaatatagtcagccagagcaacacaagcgtcatttccggaatccacaattaaaccacggcttaaatcacgtaccgatacgcgatcgccctctttcaaaaacatcagtgaagaaccgacaaacaccggattatctttcgcccacgcatcgcgccccacggtgacaatatcgtctggcgtaatgcgatgactatcgatagcgcgatccacgacataacccgtcatcagctttgtcaggctggcgggattgcgctgttgatgctcattacccgcggtgaggatctgaccggtggtgtaatccatcaatacccaggacccggcatgaatctctggaggctgaggtgaaaaaggaatgttttccgccgcaaaaccagacgataagttaaaaacgaacaaagaagcagcaataataagacggcgtttcaacagcaaaccctcaggagtttcaaatagctgttctttttacggaaatacttatgaactggctggaataaagtgcaagaaaatgtgactaccctctcatttttatctgacatgatctgttgccactcgctgccaaattgtggcgctaaagctgattagcacggtgatatttgatactctggcagacagcagaaataacggatttaacctaatgatgaatgacggtaagcaacaatctacctttttgtttcacgattacgaaacctttggcacgcaccccgcgttagatcgccctgcacagttcgcagccattcgcaccgatagcgaattcaatgtcatcggcgaacccgaagtcttttactgcaagcccgctgatgactatttaccccagccaggagccgtattaattaccggtattaccccgcaggaagcacgggcgaaaggagaaaacgaagccgcgtttgccgcccgtattcactcgctttttaccgtaccgaagacctgtattctgggctacaacaatgtgcgtttcgacgacgaagtcacacgcaacgttttttatcgtaatttctacgatccttacgcctggagctggcagcatgataactcgcgctgggatttgctggatgttatgcgtgcctgttatgccctgcgcccggaaggaataaactggcctgaaaatgatgacggtctaccgagctttcgccttgagcatttaaccaaagcgaatggaattgaacatagcaacgcccacgatgcgatggctgatgtgtacgccactattgcgatggcgaaactggtaaaaacgcgtcagccacgtctgtttgattatctctttacccatcgtaataaacacaaactgatggcgttgattgatgttccgcagatgaaacccctggttcacgtttccggaatgtttggggcatggcgcggcaataccagctgggtggcaccgctggcgtggcatccagaaaatcgcaatgccgtaattatggtggatttggcaggagacatttcgccattactggaactggatagcgacacattgcgcgagcgtttatatactgcaaaagccgatcttggcgataacgccgccgttccggttaagctggtgcatatcaataaatgtccggtgctggcccaggcgaatacgctacgcccggaagatgccgaccgactgggaattaatcgtcagcattgcctcgataacctgaaaattctgcgtgaaaatccgcaagtgcgcgaaaaagtggtggcgatattcgcggaagccgaaccgtttacgccttcagataacgtggatgcacagctttataacggctttttcagtgacgcagatcgtgcagcaatgaaaattgtgctggaaaccgagccgcgtaatttaccggcactggatatcacttttgtcgataaacggattgaaaagctgttgttcaattatcgggcacgcaacttcccggggacgctggattatgccgagcagcaacgctggctggagcaccgccgccaggtcttcacgcccgagtttttacaaggttatgcagatgaattgcagatgctggcacaacaatatgccgataacaaagagaaagtggcgctgttaaaagcgctttggcagtacgcggaagagatcgtctaatttgaagcctccgccgctggtacggcggaggtcaatgttgagtcaggctttttgaacggtgatactccacgctgcatcgccaatctgctgataatcggtgatggcatgcccttcttctgccgcccactgtgggattgcttcagttgcctgggtgcaatcaaactcaattaccaactcatcgccgctggccatttctgccagtgctgcttttgcttctatgagtggaaacggacagacctgcgtcaccacatccagctttttaatcgccatctttacaccttacttaatttgccgcagcagttgccagtcgcgccttacgctgcggtcgaacatacacaagccaggacgcagtccagactccgagaatcataaatacaaggccaatccagccctgccaggtcatcattgcagtcataaccagtccattaccgataaagcaaccacctgcaatactggcaccgaagcccatcagtacaccacctaacccgctacgtaatgttgtttgtgcatcagctgcgcgaacgcggaactcacggctcgctttggctgcaataaatgaccccacgaagatccctaacaccaggaaaacgccccagttaatgtatttcacgtcacccgcgaccagaaattgcagaatattggccgttggggaagtgattcctaacccaaacatgcgtccggttgcttcactcaggggccaggctaaaagcgcaatcaaaccgatgagtacagcagtgacaaagggatgccagcgtttttcaaacagaatatgagcgatcccagttcggcgcggcggtaaggtcgcgactttgagttttggcttcttcaactctttcatcaccacccagagcgttatcaccagcaaaacggcaaccaacggccaaacagacaaattaaaagtctcagcaatagagttatgttcagtactgtagtgctgcaaggtttgatttaaaccactggcatgtggagaacgcatcaccgcactcatcaccatataagtgaaaagcgcgatccaactgccgatcaatccctcacccgcgcgataccaggtcccggtggcacatccacccgccagaacaattcccagcccgaagatatacccacctataacagtaccaagccacgggaacgcctcggcttcgtaagtcagtaggcccgcctgaattaacgcaaaaacccccacgctttgtaccgaaattgcaatcagcaaggcgtaaaacatgcgattatttttcgcgatatacatatcgcgaaaaccacctgtcaggcaaaaacgcccacgctgcatgacaaatcccagcagagcaccacaaattagcccgcttaatatcattgaaaacataaattaattaaccagatgaatgttaatgaggaaattattcatgactggtggaatgcagaccaataaccaaattctctaaattagaacaaatggttattaatgaggatttcgataaaaaaaaataaaaaaaccggagccaaatattcattcgactccggttgattattagaaaagatgattatgcaacgtcttcgtactgcggaactgggttacggaagctcttggtgacgcaagctaggtaaatcagaccgatagcagcccaaatcagacccagaaccattgagctttcttccaggttaacccacagcgcaccaacggtcagcgcaccacacatcggcaggaacagatactggaagtgatctttcagcgtcttattacgcttctcacggatccagaactgcgagatgaccgacaggttaacgaaggtgaacgccaccaacgcaccaaagttaatcagcgctgtagccattaccaggtcgaagttgattgccagcagggcaatcgcgccaaccaggatgatgttcatcgccggagtacgccatttcgggtgtacataaccgaagaagcttttcgggaatacgccgtcacgacccattacgtacatcagacgcgctacgcctgcatgcgccgccataccggacgccagtacggtaatggtggagaagatcagcgcgccaacctggaacgctttacccgcaacgtacagcatgatttcaggctgtgacgcatccggatctttaaagcgagagatatccgggaagtacagctgcaggaagtaagttgcaaagatgaagatcatgccgccaatcagcgcggtcaggaaaatcgcacgcgggatcacgcgctctgcatctttggtttcttccgacaggttgctgatgccgtcaaagccggtaaaggaaaagcacaggattgtcgccccggtaatcatcggaataacatgcgcatcgccagaccagaacggacgagtgctcgccagcgtaccagcgccttcaccttcaaatacgccataaacaaccatgcccagaatcaccgcgatcagcactacctgcaacacgacgattacagtgttgaagttcgctacggatttcagactacgcaggttaaaggcggtcataaaggccaccagcgccaccacaaacatccacgatgggatggaaggcaccagagcttcaaaatagattttcgccagcagaatgttgatcatcggcgcgaacagatagtcgagcagagaagaccaacccaccataaagccgacagtcgggctaatggatttctgggcgtaagtatatgcagagccagcagaaggatagcggcgaaccagcttcccgtagctcagagccgtaaacaggatcgcaatcaatgcgaacgcataggctgtcggcacatgaccatccgtgaggcctgaaacgataccaaaagtatcaaacagcgtcatcggctgcatataggcaagacccatcattacaaccggaactaacgtaagcgttttacgcaattccacgcgagaggtgtttggagtaacgttatgcgacatggtcattctcctttacggtgataaccgtcgcgtaagcaaaaaattgccccatttttttggattcctcagcgacaacaactgtcgatttttagtaaatatctatccggtacgaagcccggcctcttggtatgaatgattggtttgaagcaaaaaataaccgacgctgatgaaacgtcggtttttagtcattttttgacagcggcgcattgtgcctaaatgggggggaaatgacaagagaatgagaagcttgtcataataatttttctttaaatggctgattttccgtcatcagattttgcataaacaccggcgatcgcactatttgctaaaatttcatcccgccaccagccgctggcaagccctgcggtctgttcgttccagccaatccagacgggttcaaagagagtttgggcgaccactttcttctcgattaacgcgccactatcgagaaaacgttgcaccagataacggggtaaatagccgcagccgaggccgctaatttgcagctccagcttggttttaaaatcgaaaacggtaatggcttcttgttcgtcgagaagttgtgaggccgtagaagcgcctgcctgcgcagtgtcccccaccacaatcgcccgatatcgcttaatgatacgacggtttaacggctcttcttcctgggctaacggatgatgaggcgcgaccgcaaagacttgttccagatcgcccaaccgcgagaaaccaaactcactggaagatggtggctcatgcatcgcgccaacaataatatccgctcgcccctgagtcagggcatcccaggaaccaccgagtacgccattgataaacttcaggcgcgtcacgctatgatgttgataaaaagcttcaatcagtggcgcaagcagagaaaaaggaaacgtgtcgtccacgccaatcaccagctcgttttcccagccttcatgcagtttgatcgcctgcttttccagttctcgcacggtatgcagaacttcccgccccttctctaataacatttttccggtacgggtgaatttagcgcggtgaccgctacgatcaagtaattgaatattaaggtcgctttccagcttgtgaacggtgtaactcagagcggacggcgtcttgtagagtttagccgacgccgccgcaaaactgccttctttttctaaggcatcgaggatcatcaacacatccagcagttgtttcatacacgcccccttgcagtgcatgcggcgtcctgctggcgtgatcgtttactccagcggcattaccagcggatcgggatactggtattcaaatcccagttcattacaaatccgactgccatcaataatcttacctttgccgctgtccagactatttctgaactgcggaggttccagccccagtaaacgggccatctgcggatagaaaacattacgcgcagggtgagctggcgcacatatattatagatgtgtccgcctttaggtgcctgtaacaacagagtgatagcgccaataacatcttctaaatggactaaattaacaccatgttcaccatcaggcgcggtttttccggcaaagaagcgtccgggatgacgtcccggtccgaccagccccgcaagacgcagaatatcgaccgaagtaccgggtaaattgtgcagccagtcttcgagttcttctaatactcgtccactgttggtcaccggattacgcggggtggtttctttcaccgtgccttgcgcgtcgccatagacagacgttgagctggtaaaaataatgcgaggaatacgatgggccagcgcgctatccactaactcttgtaccgcttgtaaatagaactcatcgccggggccgctacgacgtgccggaagcgtaatgaccagcgcatcggcatccatcagggcatccagatcgtcagaatcgcaaactaactcaggctccatgcgaagcagatagctatcaatgccactcattcgggccgcttcgacaccatcttgtgtggttttactcccggtgacttgccagcctcgcgctgaaagtgacatcgccagcggcatgcctaaccaccctaacccgacaattgcgacctttttcatccgttatctcctgatacaccttagatctataaggctacgctagcgtatcaaaactgacaattcattctatgaatgaatctgttcaataatgataacgacatgctgcaatgagcagtgaatcgtcggtaaccgcgtataccagacggtgctcctctgtaatgcgtcgggaccagaaacctgacaaattatgtttcaggggttctggcttccccttaccttcaaatggcgttctgcgggtatctttgataagttcattgatctttttaacaattcgcttatctgtttcctgccagtacagataatcatcccatgattcctcagaccagattagtttcactcaataatgtccttttctgttcctttgcctgatttcaggctatcgattgagtccatcaatctccgggcgttagcgggggagcgcagtagataagccgtctcttccagcgagttgtattcttcgagtgacatcagaacacaagcctctccattctgacgagtaataaggatcggggcatgatcttcaacggctttcatcattgttgccgacaaattctgacgcgcttcgctgtagctaattgtacgcatgtcaatctcctcttttgtacagtttattgtacaatgatgggcgttaattaactatttattaattagtttgtagatcaaggtattgtcagtgagacgaaaatccaggcttcgctatttttggtgccgtcagcttagaggacagtcctcttagccccctcctttccccgctcattcattaaacaaatccattgccataaaatatataaaaaagcccttgctttctaacgtgaaagtggtttaggttaaaagacatcagttgaataaacattcacagagacttttatgacacgcgttcaatttaaacaccaccatcatcaccatcatcctgactagtctttcaggcgatgtgtgctggaagacattcagatcttccagtggtgcatgaacgcatgagaaagcccccggaagatcaccttccgggggcttttttattgcgcggttgataacggttcagacaggtttaaagaggaataacaaaatgacagacaacactcgtttacgcatagctatgcagaaatccggccgtttaagtgatgactcacgcgaattactggcgcgctgtggcattaaaattaatcttcacacccagcgcctgatcgcgatggcagaaaacatgccgattgatattctgcgcgtgcgtgacgacgacattcccggtctggtaatggatggcgtggtagaccttgggattatcggcgaaaacgtgctggaagaagagctgcttaaccgccgcgcccagggtgaagatccgcgctactttaccttgcgtcgtctggatttcggcggctgccgcctttcgctggcaacgccggttgatgaagcctgggacggcccgctctccttaaacggtaaacgtatcgccacctcttatcctcacctgctcaagcgttatctcgaccagaaaggcatctcttttaaatcctgcttactgaacggttctgttgaagtcgccccgcgtgccggactggcggatgcgatttgcgatctggtttccaccggtgccacgctggaagcaaacggcctgcgcgaagtcgaagttatctaccgctcgaaagcctgccttatccagcgcgatggtgaaatggaagaatccaaacagcagctgatcgacaaactgctgacccgtattcagggtgtgatccaggcgcgcgaatcaaaatacatcatgatgcacgcaccgaccgaacgtctggatgaagtcatcgccctgctgccaggtgccgaacgcccaaccattctgccgctggcgggtgaccaacaacgcgtagcgatgcacatggtcagtagcgaaaccctgttctgggaaacgatggaaaaactgaaagcgctgggtgccagttcaattctggtcctgccgattgagaagatgatggagtgatcgccatgagctttaacacaatcattgactggaatagctgtactgcggagcaacaacgccagctgttaatgcgcccggcgatctccgcttctgaaagcattacccgcactgttaacgatattctcgataacgtgaaagcacgcggtgatgacgccctgcgggaatacagcgcgaagtttgataaaaccacggttaacgcgctgaaggtgtctgctgaggagattgccgccgctagcgaacgcctgagcgacgagctaaaacaggcgatggcggtggcagtaaaaaatattgaaaccttccacactgcgcaaaaactgccgccggtagatgtagaaacgcagccaggcgtgcgttgccagcaggtcacgcgcccggtcgcttcagttgggttgtatattcctggcggctccgccccgctcttctcaacggtattaatgctggcgactccggcgcgtattgcgggctgtaaaaaagtggtgctgtgctcaccgccgccgattgccgatgagatcctttatgcggcgcagctgtgcggtgtgaaggacgtgtttaacgtcggcggcgcacaggccattgccgcgctggcgtttggtacggaatctgtgccgaaagtggacaaaatcttcgggccgggtaacgcctttgtcaccgaagcgaaacgtcaggtgagccagcgtctggacggtgcggctatcgatatgcccgcaggcccgtcggaagtgttggtcattgccgacagcggcgcaacgccggatttcgtggcttctgatttgctttctcaggctgaacacggcccggactcacaggtgattttactgacgcctgacgctgatatggcgcatcaagttgccgaagccgtcgaacgccagttagcagaactgccgcgtgccgaaaccgcccgccaggcactgaacgccagccgcctgatcgtgactaaagatttagcgcagtgcgtagagatctccaaccagtacggcccggagcacctgatcatccagacccgcaacgcccgcgatctggtcgatggcatcaccagcgccggttcggtatttcttggtgactggtcaccggaatcggcaggtgattacgcctccggcaccaaccacgttctgccgacttacggttacaccgccacctgttccagcctcgggctggcagatttccagaagcgtatgaccgtgcaggaactgtcgaaagaaggtttctccgcgctggcttcgaccattgaaacattggccgccgccgagcgcctgaccgcccataaaaatgccgttactttgcgtgttaacgcccttaaggagcaagcatgagcaccgtgactattaccgatttagcgcgtgaaaacgtccgcaacctgacgccgtatcagtcggcgcgtcgtctgggcggtaatggcgacgtctggctgaacgccaacgaataccccactgccgtggagtttcagcttactcagcaaacgctcaaccgctacccggaatgtcagccgaaagcggtgattgaaaattacgcgcaatatgcaggcgtaaaaccggaacaggtgctggtcagtcgtggcgcggacgaaggtattgaactgctgattcgcgctttttgcgaaccgggtaaagacgccatcctctactgcccgccaacgtacggcatgtacagcgtcagcgccgaaacgattggcgtcgagtgccgcacagtgccgacgcaggacaactggcaactggacttacagggcatttccgacaagctggacggcgtaaaagtggtctatgtttgcagccccaacaacccgacagggcaactgatcaatccgcaggattttcgcactctgctggagctaacccgcggaaaagccattgtggttgccgatgaagcctatatcgagttttgcccgcaggcatcgctggctggctggctgacggaatatccgcacctggctattttgcgcacactgtcgaaagcttttgctctggcgggccttcgttgcggatttacgctggcaaacgaagaagtcatcaacctgctgatgaaagtgatcgccccctacccgctctcgacgccggttgccgacattgcggcccaggcgttaagcccgcagggaatcgtcgctatgcgcgaacgagtgacgcaaattattgcagaacgcgaatacctgattgccgcactgaaagagatcccctgcgtagagcaggttttcgactccgcaaccaactacattctggcgcgctttaaagcctccagcgcagtgtttaaatctttgtgggatcagggcattatcttacgtgatcagaataaacaaccctctttaagcggctgcctgcgaattaccgtcggaacccgtgaagaaagccagcgcgtcattgacgccttacgtgcggagcaagtttgatgagtcagaagtatctttttatcgatcgcgatggaaccctgattagcgaaccgccgagtgattttcaggtggaccgttttgacaaactcgcctttgaaccaggcgtgatcccggaactgctgaagctgcaaaaagcgggctacaaactggtaatgatcaccaatcaggatggtctgggaacacaaagtttcccgcaggcggatttcgatggcccgcacaacctgatgatgcagatcttcacctcgcaaggcgtacagtttgatgaagtgctgatttgtccgcacctgcccgccgatgagtgcgactgccgtaagccgaaagtaaaactggtggaacgttatctggctgagcaagcgatggatcgcgctaacagttatgtgattggcgatcgcgcgaccgacattcaactggcggaaaacatgggcattaatggtttacgctacgaccgcgaaatcctgaactggccaatgattggcgagcagctcactaaacgagaccgttacgctcacgtagtgcgcaacaccaaagagacacagattgacgttcaggtgtggctggatcgcgaaggtggcagcaagattaacaccggtgttggcttctttgatcacatgctggatcagatcgccacccacggtggtttccgtatggaaatcaacgtcaaaggcgacctctatatcgacgatcaccacaccgtcgaagataccggcctggcgctgggcgaagcgttaaaaatggctcttggcgacaaacgcggtatttgccgctttggttttgtgctaccgatggacgaatgccttgcccgctgcgcgctggatatctctggtcgcccgcacctggaatacaaagccgagtttacctaccagcgcgtgggcgatctcagcaccgagatgatcgagcacttcttccgttcgctctcatacaccatgggcgtgacgctacacctgaaaaccaaaggtaaaaacgatcaccaccgtgtagagagcctgttcaaagcctttggtcgcaccctgcgccaagccatccgcgtggaaggcgacaccctgccctcgtcgaaaggagtgctgtaatgaacgtggtgatccttgataccggctgcgccaatctgaactcggtgaagtcagccattgcgcgccacggttatgaaccaaaagtcagccgtgacccggacgtggtgttgctggccgataaactatttttacccggcgttggcactgcgcaagcagcgatggatcaggtgcgtgagcgcgagctgtttgatctcatcaaagcctgtacccaaccggtactgggcatctgcttagggatgcaactgctgggtcggcgcagcgaagagagcaacggcgtcgacttgctgggcatcattgacgaagacgtgccgaaaatgaccgactttggtctgccgctgccgcatatgggctggaatcgcgtttacccgcaggcaggcaaccgcctgtttcaggggattgaagacggcgcgtacttttactttgttcacagttacgcaatgccggtcaatccgtggaccattgcccaatgtaattacggcgaaccgttcaccgcggcggtacaaaaagataacttctacggcgtgcagttccacccggagcgttctggtgccgctggcgctaagttgctgaaaaacttcctggagatgtgatgattattccggcattagatttaatcgacggcaccgtggtgcgtctccatcagggcgattacggcaaacaacgcgattacggtaacgacccgctgccgcgcttacaggattacgccgcgcagggtgccgaagtgctgcatctggtggatctgaccggggcaaaagatccggcaaaacgtcaaatcccgctgattaaaaccctggtcgcgggcgttaacgttccggtgcaggttggcggcggtgtgcgtagcgaagaagacgtggcggcgttactggaagcgggcgttgcgcgcgtggtggttggctccaccgcggtgaaatcaccagaaagggtgaaaggctggtttgaacgtttcggtgccgatgccttagtgctggcgctggatgtccgtattgacgagcaaggcaacaagcaggtggcggtcagcggctggcaagagaactcgggcgtttcactggaacaactggtggaaacctatctgcctgtcggcctgaaacatgtgctgtgtaccgatatctcgcgcgacggcacgctggcaggctctaacgtctctttatatgaagaagtgtgcgccagatacccgcaggtggcatttcagtcctccggcggtattggcgacattaacgatgttgctgccctgcgaggcactggcgtgcgcggcgtaatagttggtcgtgcattactggaaggtaaattcaccgtgaaggaggccatcgcatgctggcaaaacgcataatcccatgtctcgacgttcgtgatggtcaggtggtgaaaggcgtacagtttcgcaaccatgaaattattggcgatattgtaccgctggcaaaacgctacgccgaagaaggtgcagacgaactggtgttctacgatatcaccgcttccagcgatggccgtgtggtagataaaagctgggtatctcgcgtggcggaagtgatcgacattccgttctgcgtggcgggtgggattaagtctctggaagatgccgcgaaaattctttcctttggcgcggataaaatttccatcaactcccctgcgctggcagacccaaccttaattactcgcctggcggatcgctttggcgtgcaatgcattgtggtcggcattgatacctggtacgacggcgaaaccggtaaatatcatgtgaatcaatataccggcgatgaaagccgcacccgcgtcactcagtgggaaacactcgactgggtacaggaagtgcaaaaacgtggagccggagaaatcgtcctcaacatgatgaatcaggacggcgtgcgtaacggttacgatctcgaacaactgaaaaaagtgcgtgaagtttgccacgtcccgctaattgcctccggtggcgcgggcaccatggaacacttcctcgaagccttccgcgatgccgacgttgacggcgcgctggctgcttccgtattccacaaacaaataatcaatattggtgaattaaaagcgtacctggcaacacagggcgtggagatcaggatatgttaacagaacaacaacgccgcgaactggactgggaaaaaaccgacggactaatgccggtaattgtgcaacacgcggtatccggcgaagtgttaatgctgggctatatgaacccggaagccttagacaaaaccatcgaaagcggcaaagtcaccttcttctcgcgcactaaacagcgactgtggaccaaaggcgaaacgtcgggcaatttcctcaacgtagtaaatattgcgccggactgcgacaacgacacgctactggtactggcgaatcctatcggaccaacctgccacaaaggcaccagcagctgcttcggcgacaccgctcaccaatggctgttcctgtatcaactggaacaactgctcgccgaacgcaaatctgccgacccggaaacctcctataccgccaaactgtatgccagcggcaccaaacgcattgcgcagaaagtgggcgaagaaggcgtagaaaccgcactggcagcgacggtacatgaccgctttgagctgaccaacgaggcatcggacttgatgtatcacctgctggtgctgttgcaggatcaggatctggatttaacgacggtaattgagaacctgcgtaaacggcatcagtgagttgcagggtaagcggatgcgatgttgttgtcgcatccggcaaaaaaaaagggcaaggtgtcaccaccctgcccgttttctttaaagctgcaaagattacttcgcgttataattacgcagagcgttacgccccagcacaatccccgcgccaaccatgccgcccagcagcaccgccagaatcaaggtaattgcctttttcgggctatcgcgacgaataggtaacgtcggtttcatcacataacggtaagcatgaatatcaagatcatcaacctttaagttttcaatatccaacaggttttgacgtgtctgatagtagtttggtgagaacaccaacggacgggtcgcctcatgcttaatcatcgactccagcgcttcgctccccaaaaggaacaacgtatcttgtgtcacatcttcagtctgctgaacctgtggctttgccacctgcgcctgattcgcatactgcaacgcttcctgaatctgacggatacgcagatctttctgctcctgcgcgactacttcctgcgttcttaaagagtcctgcaagtttttccgtcccagagcaatgttgtctttgagatccttttctagctcttgattcactttatcatcaacttgctgaatgtattgggccaacttcatttgtgctccctctgcagtttgcccaacataagaaacagtcaatggtaattgctggttcttaacagaaggttcgatggtaagtttttctggttcttcctgattatccagcgtttctgctaatgcagagaaggcagaactgaagcgaccaattaacgtctcctgtaaatccgatactttcggtgcagcctgaccatagataacattcatggcattgttatagccagcaatttgccccacgtcgggctgagtgataattgctgttgacgtccatttctccttcgctactgccaaatatccaatagccagggcaatagccacaatgacggaaatgatgattgtcatcttgccacgccacaactgcactagtaaatcaatcaaatcaatctgttccgggtcatggttttgcccagaaacattattattttctactctcatcattaccctaactgacggaaatttccaagtccgcatagtttagcgataatcctagtgaatgctataggataagtgataaaaataatgaattattggggaggtaacaaaagacaatcagggcgtaaatagccctgataacaagatgttagtcgctgccaaagagatcgcgggtgtataccttatctgccacatctttaagctcttctgccattcggttagagataatgacgtcggcttgttgtttgaagatggcgagatcacgttccagccgagagttgaagaatgagtcttctttcatcactggctcgtagatgatcacttcaacgcctttcgccttgatacgcttcataatcccctgaatagaagacgcacggaagttatctgaaccgctcttcataatcagacgataaatacccaccacttgcggtttgcgtgacaaaatggcatcggcaataaaatccttacgcgtgcggtttgcatcgacaattgccgagatcaggttattcggcacagactgatagttcgccagtaactgcttggtatctttcggcaagcaataaccaccataaccaaacgacgggttgttgtaatggttgccaatacgcggatcgagacaaacgccttcgataatctggcgagtattcagacctaaactttctgcgtagctatccagttcgttaaagtatgccacgcgcatcgctaggtaggtgtttgcaaaaagtttaatcgcttctgcttcggtcgaatcggtgaacagggtcgggatattttgcttaatcgcgccttcctgtaacaacgcagcaaaacgttctgcgcgttctgaacgctcaccgatgacaatacgtgaaggatggagattatcgtaaagggctttaccttcacggagaaattccggagagaaaataatattttcagtacgatatttcttatgcatcgcttcggtaaaaccaacgggaaccgttgatttgatgaccataaccgcataaggatttatctcaactacgtctttaattactgattctacactggatgtattgaaataattagttttaggatcatagtcggttggagtggcgatgatgacataatcagcatcccggtaggcttcatttttatctaatgtggcattaaagtgtattttatctgattgcaaaaactgctgaatttccttatcaacaataggagatatccgatcattcagcatagcaacgcgtgacggtaaaatatctaatgccacaacctcatgattttgtgcgattagaagcccgtttgacaagcctacatagccagtaccggaaatggtgattttcatttcatgctctcagaattaacttaactgtgaatcatgatgtttttagcatcctgataagagctaaatgttttaacgctacgttattagctggtcaacgctacgaaaaacaattcagattttctttataagaatagctgatatttattaagttaatattaagcagtgaaatttagtctataagataaatggcaaaaaaaaagcccggtgcaatatacgccgggcctcaattttactgttggttaaatcagattaatccagccattcagtatggaacacaccttctttatcaatgcgcttataagtatgtgcaccgaaatagtcacgctgtgcctggatcaggttcgcaggcagaacagcggcacggtagctatcgtaataggcaaccgcagcggcgaaggtcggaaccgggataccgttctgtactgcataagcaacgacatcacgcagcgcctgctggtagtcatcggcaatttgcttgaagtacggagccagcagcaggttagcgatctgcggattttcggcatatgcatcggtgattttctgcaggaactgcgcacggatgatgcagccagcacggaaaatcttcgcgatttcgccgtagttcagatcccagttgtattcttcagacgcagcacgcagctgagagaagccctgagcgtaagaaacgattttgcccagatacagcgcacggcgaactttttcgatgaactcagccttgtcgcctgctgactgagcttgcggaccagagagaactttagatgcggcaacgcgctgatctttcagagaagagatataacgtgcaaacacagactcggtaatcagcgacagcggttctccgagatccagcgcgctctggctggtccatttaccggtacctttgttagccgcttcatccaggatcacatcaaccaggtagttaccgtcttcatcttttttagtgaagatatctttggtgatgtcgatcaggtagctgctcagttcaccgttattccactcggtaaaggtctgtgccagttcttcgttagagagattcaggccgcctttcaggagagaataggcttcagcaatcagttgcatatcaccgtattcaataccgttgtgaaccatcttcacataatggcctgcgccatcagcaccgatataggtaacgcacggttcgccatcttcagcaacggcggcgattttggtcaggatcggcgcaaccagttcataggcttctttctggccaccaggcatgatggacggccctttcagcgccccctcttctccgccggaaacaccggtaccgatgaagttaaagccttcggcagaaagctcacggttacgacgaatggtgtcctggaagaaggtgttaccaccatcgatgatgatgtcgcctttatcgagatatggtttgagcgaatcaatagcagcatccgtgcctgcacctgctttcaccattaacaggatgcgacgaggcgtttccagagattcaacaaactctttcaccgtatagtaaggaaccagtttcttgcctggattttcggcaatcacttcttccgtcttttcacgggaacggttgaaaatagagacggtataactacggctttcgatgttgagcgcaaggttgcgccccatcactgccataccgactacgccgatctgttgctttgacattgtttactcctgtcagggggtggtcaccgccgagtgtgcggcttaaatgtggtatagatgttaactcactcatagagatggtgaatagcattacctttgctataccacactgaatatctcaccttttccgtcttttaaaacttatttatatgaaattactgaattacttgttcagtaactcaagaataagttttgtcttttcttccatcagcggcacatcaccgcgagattccacattcaaccgcaccaccggttcggtgttggaggtgcgcaggttaaagcgccagtcggcaaaggtcatgctgatgccatcggtgcgatccaccgccagcgcctcgcggctaaaatgctgttccacgcggttaatcgcctcaacgggttgcgccagtttgctgttgatctcaccgcttgccggaaacgctgccatccggtcgcgcaccagttcgcccagcgtttttcctttcaggcacaccagttcggcgaccagcagccacgggatcatgccgctgtcgcagtaagcgaaatcacggaagtaatggtgggcgctcatttcaccaccgtagatggcgtcttccttgcgcatccgttctttaataaaggcgtgtccggttttcgacatcaccggcgtgccgcctgcggcagtcaccacatcaacggtgttccaggagagacgcggatcgtggatgatcttcgcgccgggatttttttcgaggaatgcttctgccagcaggccgacaatgtagtagccctcaataaactgccctttttcgtcaaacaggaagcagcggtcaaaatcgccatcaaaagcaatgcccatatccgcaccgtgtttgatgaccgcattgcgggtgtcgtcgcggcattccggcagtagcgggttaggaataccgttggggaaattgccgtccggcgtgttgtgcactttgattaattccacgggtgcgccaagggctttaaagcgggcttcgatggcgtccaccaccggacccgctgcgccattcccggagttaatcaccagcttgagcggcgtgaggtttttgacattgatataaccgaacaggtgatcaacgtaagcgtcacgcagattgatttgctgatagcgaccgcgtttggtttcatcaacgggaggaaagtcgttggcttctgccagacgctggacatcgcgcagtccggtatcaccgctgatcgggcgagccccttcgcgcaccagtttcatgccgttgtaatccatcgggttatggctggcggtaacttcaatgccgccatccacgccgagatggaacgtggcgaaatagatctcttcggtgccggacatgccaatatccagcacatcgacgcccgcatcctgtaaacctctcgccagcgccagttttaaggtttcgctggtgaggcggacatcaccgcctaacacaatggttttcggtttgagaaattcgccataggcgcgaccaatgcgccaggcgatatcttcattcagttcttcgcctaatttcccgcgaatatcataggctttaaagcaggttaattttttcatgtcgttaccctttttcaggcaatagttggccctgaccgaaacggccaattttgtttttgtcgttatttacatctcggtttcgcattcattgcctgatgcgacgtttacacccgtccgtagcgatccgcgaaacgcaccacatcatcctcttcgagataagagccggagcgcacttcaattaaatcgagcggaattttccccgggttttccaggcaatgcatcgcccccagcggaatataaatggactcgttttcaccaagcagtttgatatcaccatcaatggtgacttttgccgttcccgcgacaaccacccagtgttccgcgcggtgatggtgcatctgtaccgacaagccctcgcccggtttcacggtgatgcgtttcacctggtagcggtcgcccgcgtcgatagagtcatatttgccccacgggcgatagacttcgcgatgcacccgatgctcatggcgaccatcggctttgatctgctcgaccacttttttcacatcctgcaccgcgttacggtcggcaatcagcaccgcatctttggtctgcaccactaccagatctttcaccccgacggtggttacgaggccagattcggcgtacacatagctgttttcagttttgtgattaatcacatcgccgtggcaaacgttgccctcggcggtgtgggcgctaatttcccataatgaggaccaggagccgacatcgctccagcccgcatccatcggcaccacaacggcatctgccgtacgttccatgaccgcgtaatccaccgactcttccgggcaggcgagaaacgcttcttcatccacacgaataaaatcgagatccggatcgacggcgctcatcgctttttcacaggcatcgagaatatccggacgatattttttcagttcttcgagatagcgtccggcgcggaacaggaacatgccgctgttccagtaatattcgccgcttgccacataggcctgggcggtttccagattcggtttttcgacaaactgcgccacttcaaaggccaccgtatcctgctcacccgcagacacttcaccgcgacgaatatagccataaccggtttctggtagatccggcacaatgccgaaggtcaccagcttgcccgcttcggcatatggcatggcattacgcacggcggcacggaacgcgtcttcatcggcaatcacatgatccgccgccaataccagcattaacgggtcgctctccgggctatgacgttttgccgccagcgccgccagcgcaatggcaggtgccgtgtttcgccctgccggttcgagaataatgttctcggtaagtttgttcagttgacgcagctgttccgcgacaataaagcggtgctgctcattgcaaatcaccaccgggctttcgcactccacgccgttcaggcggcagatggtggtttgcagcatggtgagatcgcctttcaggcataaaaactgcttggggtaaagtacgcgggaaagcggccataagcggctaccggagccacctgccatcacaactggatagagtttcgactgcgccataattatccccgaatatcatttataaattgacgtaacacgttctctttatcgagtgtgcgttcggcatattcacgtgccaccgtgttgtgtttgggcagcaggagcgcctgacggatccccgccaccagcgcctcgaccgattccggttctacgcaaaccgcaatgcccggaaaggtttcgcaaagctgccccagttctgtgtgggcctctgcggtaatcaccgcgttaccgcctaccgccagaatattggtcagtttcgacggcaatacggcatctgccgcgccgcgtttttgcaccaccagatggcaatcgcccatcttcagcagtgcgggtaaagcgtcatacgattgcagcgggaaaaattgcatgttgcgcagtccacgctgctgcgccattttttccagccgcgctttgccgccgccctgcccgacaatggcaaaaatcagcggttcatcgcgcagacgatcggcagcttcaataacgttttccagcccctgcttttcaccaatattgccggagtaaagaatgatttttttgttatccggcaggtcaagctggttacgaagggcgtcaacatcggcatctgcaacatgctgaaaacgggcaatttccgaccagttggggaagaagatgacgttttccgccgccacgcctttttcgatggctttattcatcatcgaacgcgaaatcgtggagacgttatcgacgttatgcagtccgctacgttcgaacgccgttgccagctgtgccactttgctgcctttgccttttccggcaaggcccagccccagcatggcgtccacttcgtaatcctgaatatgcagcacggtacgcgcaccagaaagtttcgccagcaggcgcattcccggcgtgcaaaacagcgttggcaccacgccgataatgcgatccggcttccagcgacgttgcgccatcagaggaaagaaactgctgacggcaaaactgccgagatgtaacaggcgtttcagggtgctcggctgttttggcacgtacagcgggcagcgccacaccgtggcggccccctcttctcgtttgtaccgccaggcggaatagttctcgcccacctgccactgcgggtagtaaggcggtgcggtaataacccgcacctcatgaccttgtgccgccagccattccaccatctcgccggtgtatttgccgataccggttaactccggcgagtagttaatgccgtagaccagtattttcataatccgggtactccggcacgcttctcagcgagaaaataggcgcggctgttagcgtgaacatcgttactggcgagcagcgcgtccggcgtcagccagcggtaatcgtcatgctgctcatccggcagtatcagctcttcttcagcgactctgaagcgaaaaccgagcaccacatagtgagtggtgaaatccgtgccggagaagttatcgtcataaaagtgctgccagacaccgtaaaactggcctgctgttatcggcagacgcagccccagttccgccatcgtcagccgctcgaatgcggcttccagcgtttcgtctttctgcacgcgccctcccggcacaaaccagtaaccctgcgccgggcggttggttcttttgccaagcagaaactcaccgcgactgttctcgacaataaagtcgagagagacaagcggggtggagcgcactaccgtggcaaagtcttcctgacgtaaaaacatcattacccccgaaagcggtcttgattctcaaggaaccactggtaagtgctggcaagccccgcttccagtgagatttcgtgataccagccaagctgatgcaggcgcgtcacatccagcagtttgcgcggcgtaccatccggtttgctggcatcaaaaaccacccgacctttgtaacccaccactttggcgatggtttgcgccagctcgcggatagtgcagtcaacgcccgtgccgacgttaatgtgcgacagcatcggctgggtgttctccagccagacttcgtgcgccagctccatgacatgaatgctcgccgccgccatatcatcgacgtgcaggaattcacgcatcggtgtaccgctgccccataccaccacgtccggtgcattctgtgccgtcgcctcgtggaagcgacgcagcaatgcagggatcacatgcgaattactcgggtggaagttgtcatgcgggccatacaggttggtcggcatgactgagcggtaatcgcgtccgtactggcggttgtatgattcgcacagtttgatcccggcgattttggcaatggcgtaaggctcgttggtcggctccagcgtgccctgcaataactcgctttctgccatcggctgttttgccagtttcgggtagatacaggacgatccaagaaacagcagtttgttcacgtcgttctgatgcgcggcgtgaatgatgttgctctcaatcatcatgttctggtagatgaaatccgccggataggtgttgttggcaacaatgccgcccactttcgccgccgccagatagacctggtcaatgcgttcgctggcaaagaaatcatgcaccgcgcggctgtccagcaggttcagctcgtcgcgggtgcgtaataccagttccacatcaccgcgctgttcgagctgccgcctgatggcagaaccgaccatcccacgatggccagcgataaaaatgcgttgtttactcatgcttatgactccagcgcgatcgccacgtcgtagccgtgagatttcagcagagagtgttttttcgccgcttcgaggtcattagccaccatttcagacaccatctctctgagggtgatttccggtttccagcccagtttttcgtgcgctttggtcgggtcgccgagcagcgtttcaacttcagccggacggaagtaacgcggatcaacggcgataatcacatcacccggtttaacgcccggcgcgtcatgcccggtgacggaaaccacaatgcccttctcttcaacacccgtgccttcaaagcgcagtttgatgcccagctgtgccgctgccatttccacgaactgacgcacggagtactgaacgccggtcgcgataacgaaatcttccggctgttcctgttgcagcatcatccactgcatttttacgtagtctttggcgtggccccagtcacgcagggaatccatattgccgaggtacaggcacgactccagcccctgggcgatgttggcgattgcgcgggtgattttgcgggtaacgaaggtttcgccgcggcgcggggattcatggttgaagagaattccgttacaagcgtacatgccgtaggattcgcggtagttaacggtgatccagtaggcgtacagtttggcgaccgcatacggagatcgcgggtagaacggcgtggtttctttctgcggaatttcctgcaccagaccatacagttcagaggtggaagcctgatagaaacgagttttcttttccagaccgaggaagcggatcgcctccagcaggcgcagcgtacccatcgcgtcgacgtcagcggtatattctggtgactcaaaagagaccgcaacgtggctcattgcgcccaggttgtacacttcatccggctgtacttcacgcaaaatgcgcgtcaggttagaggtatcactcaggtcgccataatgcagatggaatttcgggttgcaggtgtgcggatcctgataaatgtgatccacgcgctcggtgttgaatgacgatgcgcgacgcttaataccatgcacctcgtaacctttttccagcagaaactctgccaggtaagaaccgtcttgtccggttacaccggtgatgagagcgacttttgacatgtcttattcctctgtatttttgaatttattcagtttcaacgcgttcgcgtatcaccactgcgggattcccccggcaaaccacatttgccggaagcgatttaaaaacactgcttcgtgcacccacgacggtgccgtcgccgattgtgacgcctggggcaacaaagacatcggttgccagccagcatttctcgccaatcacaataggcgtggcgttaatggtgaaatgttgacttgcatggtcgtggctaccggtgcataaataacttttttgcgatatcaccgaatgtgcgccaatggttatttcaccgagggtatataaattgacgtcatcgccgacccacgcgtaatcacctaaggttaatttccacggataggtaatttttactgacggacgaataactacgttttttcctatttttgctccgaataaacgtaataaaaaagcccgccagcgatacaatacttgtggcgaccaggcaaatattgttgcctgtactgcccaccataattgcactttaatagcgttgccgccccggaaccctttcggcaccgagaaaccgcttaaatcttgcattggttttccttatattcagactttgttatataaggctttcgtctttgaggtagtacgttggcgtaaatgccaggataattcagcccaaaagccaggcacatgtaatatttgtcgttggacttttttcgcgtcagcacacaattccatattattggtggtagataccccacccatggaaaattcagacaccaggccattgagttttttaaatgcataaccggctttatacattttggctgccagcgcgtagtcggaagaaactttatattccaggtcataacgccattttttcaagccggatacagggaaaaatatcgcctgatgactggcgggcaggctgtgataaatataccagcccggtttggcgctacgtttaattttatgcccgtcgccaaaatccagcagcgcatcgccggtgatcatcatgttatctttttgcatttttaacttacggacaaaatttgcggcatcctgatgaaaaatatcgcccgaattgagaaacaacgcgaacttgccttgtgccatcgtaatgcctttgttcatggcgtcgtagataccgttatctggctcgctgacaaagcgtaggttatagataccattgagattttccagatactcacgggtgccgtcattggaaccgccatcgacaacaatccattcgaagctgatatcttccgcctgcgccagatgcgccagcgaggcatgtgttttgactatcccttcgaggttacgaaacgcgacagtgattatgctaagcaacatgttcttattcttacctcgtaatatttaacgcttttcgcaaaataaatggacagacgattaaaaatgcatattccgggctaaatatcgaaccggtaaaaaacagcgataccggagtaaaaagatataattgcacgcgaaaattgcggttatcaccaaaagcgttgatcatcatttttatcactttccccatgtaccacagcgataaaaacactgcgaaccaggaaaaataaataatcagcagatacaaaccattgtctatggtttttccgacatccgcaccgttaaatattccgaatgatgcgacgtattcataaagtgagccaaatctgactacaccgtcaatatgggtcaaagaataaccgaccatcaccagcggaccgacaatacgataatacgatgacgatccttccgtacctaaatcgcccagacgggtggaaatataaggaaacgcgattaccacaccaaccaggaatacagccagagaaatcaatgccaacggtaactttttcttaatcgcctctttattcagatattgaaatgcccactccagcaaataaaacaggataaaagtcataacccctgaaaacgatccggataatattatccctgcgagaatcatagcatcggttttaggcgttttgataccaaactgtttgatgctgagccaaattgagattaatgccagagcgaaaaatgccggttcgaaataaagtgctgtcgtgcgcttgccgccgaatttaatgaaattcagtacatagctgttgctgtaaatcagatatttcgaaatcgactccataatactgctgccaccggtgaggataatttgcgccatctccaccgccgccagcgccaccaccagcccgatcaccagataaaagaaacgtaatatcttgcgatggttgtgtggcgaaatcgttttaaagcgaatactccacaccatgccaataatgatcacaatatagacaaacagcatggttgaagtgacgtatttactggcatccagcgactgaccaaacagatagttaaacgccgtgagtcccgcaccaatccctaaggcaatcatcaattttttaacgctgatgcgttctaaaaacagcagtaacaagacaggtaaaaaagtgacgatggtgatggggaaactttcgccaagctgggcgattttgacgttaaccagcaggtagatcagcggcagcagcaggtagctacagattctgatagaagttgacatactcctccagcatctgttgtccactgtaggtggcgcggctgcgttggctgaactcagccagcgtggtaccaaatatcgcctgcgcgatttccggtttgcttaactgcaccagttgcagcacgtcttcttcgtcgacggttttaccgccggatttttgcaacacttcccgtgccgcgtcgctatgggtggcaatcaccggcacgccaattgataacgcctcacacaaaatcagcgggtagttatcgacgcgagaactgaataccagcgcatccatctgattgagcgcgctcatcaacttgcgcttgtcagtttcaaagccgtgattaaccacgttgccagcggtgaacggcgagaacttaccaaaggtatgcagttcgattttgtcgcccagcgccatcatctcacgcaccagttgctggttagtcttgccgtcgtaacgcaagtcatgcgccaccaccgcgattttcggcttgccctgggtttcgcgcaccggaggcaagtccgccagaatcgcttcggttgccatatcaataccattattgataatccggcaacgccctggaccgtacaggctattgaaagcgtcagccacatgctggctgggggaaataaactgacagcccagcgccagcatctcacggaataactggcgtttgcccgccaccagctggtgtgcgcgatcaatcttcaccggcggatagttatttaaggtcgggcatttctggcagcccgttttccagccttcgcaaccgtcggtaaaggcgcagcgtccggtaacactccagtggtcgtgcagcgtccagaccagagtgacgtccggtttatggtttttcactttttcgcaaaagcgcaccacgctcttaagatttagccagtagctgtgcagcacatgaaaatgcaggaccaccggacccggtgtgcgagtaatggtgcgatataactcattgaaattgccaaacagatcgcgattaaacagacgaaacagggcaatattcgccatcgcggtcatccgcggcgtatgtttgatgacctgcggatagttctgatggctgacgctctctttgccgcctttgccgtaaccgtagacaaaatgtgacgccagcccctgttgcagcgcacgctggtggagatctaacgccacacctgctgccccgccttccgccagtcgcacattaaattgcagaatattcatttaattaccttcactcgcgctttttctcccaccaccagcgcgttgtccgggacagagtcgagcaccacgctgcccgcacccacggtgacgttgttaccaagcgtgatatcaccaagaataatgacgttggcaccgagttcgacgccgttgccaatgtgtggacatgccatgttatcggcaccacgattgccgatagtgacgccgtggcgaatggtgaaatcatcccccgctaccacgtttttattgatcactacggcgtaaccgtgatggatagtaaagcggcggccaatggtcgcggcggcctggatttcataaccgaaaaagcattcggtgataatgcgatacagcaccagcagcggggccgcccacagattgttgaggacgttctttttgcgccacaccgaacaaaaatgagcaacacgataggcaagaaccatgcagcacgggcgtaaactccagctgttggcacgcagatcttccagcatctttagcgcccccgaataccatcagccagacgtttgccgttacgcaccgacagcagcgtcagcaaagtgcgccaggtcatacgtttattgcggatctggtagagggtaaacagctgatattttttgcttgcacggtcaaatttatctttgtgctttcggtaaaagtggaagtacccggagaattttttcggtgacgaggtgatctgcatttcaccgtgattgatatgcaggatctgcgtcgcttcttccactttccacggttcgccgtactccaccaccatccgcaggaagatgtcgtaatcctgtgctgctttcagttcggtatcgaacaaacactctttgaaacgccatgcccaagtaaagacctgattgccaatgatattgcgtttatagaacaggcggcgtgagtacggcgatttgggatacagtggtaagcttgccggttgggaataaacttctccctggcatacgtagtcgttagcgtacaaaaaggcgtgagtgaccagttgctgtttatgggcgaggaagacgctcagacggttgggtgtccattcgtcatcgtcatcgatcccggtaatgtattccccttgcgccagcataatcgcctggttacgtaccgcgcacgccccgctgttaatgtcgttgtgaatgtaggtgatacgcggatcgttgagggcagtgacgtactgttgcagttgttcccaggaggtggagcaatcatccacgatgatcatctcccagttgctgtagtcctggcgcaggaccgattttatcgcccgaatcgccagttgttggcggttccaggtcggcatatagattgaaatcagcggattctctttcataggttgttctcccggcttatgagctggtttgcttgccggatgcggcgtgagcgccttatccggcctacggggcggtgcgaatgcaggcgtcgttatttcgcatccgacttatattcgtattcgtaatagccataatcctgatacgcgctggcgcggcggaagatggagttcagaatcacccctttcaccggaataccgttttgctcaaagcggctcagactggtttccacttctttcaatgtgttgaccgcatagcgcgccaccattaacgtggttccagcgtgacgcccgacaattgctgcatcggtcactgccagaatcggcggcgtatcaatcaacaccaggtcgtagtttttactcgcccagctcaccaattcggcaaagcgttcgctcatcaacagttcagaaggatttggcggcacctgaccgcgcgggatcaggtcaaatttggcaatagaggtcggtttagctgcggtagtaatatcgccctggccaatcagaatttccgacaggccattgacgttattggtacccaacagctcgtgggtgtagcctttgcgcatatcgcagtcgatcaacaacacccgtttattggtctgactgatcaccgccgccaggttggcgcagacaaaggttttaccgattgacgggctcacccctgtcatcatcaacacattgttctgcgcctgcatcatcgcgaagtgcagactggtacgcagactgcggatggcttcaatcgccagatcggttggattccccaccgccagtagctggctctgtttatagcgtttaatccctttgatggttttgacgctatcgcgcgctttctgccattccgacagcgggatgctggcatagacgctgataccatgttcttccagcacctgcgggctttcgatgccgcgattaaacaacgagcgcagcagcacacccacgatagagagcatcaggccgaggataattgcgccgaggataatcagtcctttcttcggtttcagcacgccaggctgggtgattgccgggtcaacaatgcgcacatcgccgacggtgctggcttcggtgattttcagctcctgctctttattcagcagttgcatatagacctgctgaccagactcgacatcgcgggtcaggcgcacaatctcctgctgggttttcggcatcgccgttacgcgaccgttaagtttggctttctcttcttccagcgcctgacgtttctccagcagcgtgcggtacgccgggtgaactttggtgtacagcttggagatttccgcctctttaaaggtcagttcgttcaactgcgcgtcgatgttcaccatcgaatcgagcaccgctttcgcttccagcggcagatcaacagaatctttatcctgacggaaggcattcagtttgttttcggcaacatcgaggcggctacgtacttccggtaactgttgcgcgaggaaagcgaggcttttcgacgcttccgccgatttgcgctcaatattttgttcctgatagttacgggcgatgctgttaagaatgtcgcggatctgttcgcgatcttcaccggtataagtcaggctcagtacgcctgcgtctttgccgttctccgttaccgtcaggctgttttgcagttggttgatcatccccaacgtggagtatttggtgacggtaaactcactgcccgggcgggcgtgaatggcttcaaccatcagcgtgacgccttcttttttcagcatctggcccgcttgcccacgggcgctaaagccgccatcactgctcagggtgtagtttttattgtccagcacattaagcgtaaacacctggcccgccatctctttcgggcggttaaaggtagtcactttcaccgtctcgttctggcgtcccatcagtcgctcccagcccgccccgaaaatcgggaacgtgtttttgctcactgcaatatcgaggtcgagatcgtccaccgttttaccaagcaccagacgcgaacgaatcaactggatctcggcgtccgatgcaggcggtttgttggctaatgccgaaccaatgtcctgcactaacgaattgccgctgttttgctcgatttgtaccagtgcgtcggcactataaatcggcgttgcgaagaaggtgtaaaccacggcacagagggcaaatacagcggtgatgccaatcacccaccagcgcgcttcaatgacggtgccgaccaggcgaccaatatcgatttcatcactgcccgttaccggagcggcatgttgttttactttttctgtcattcttatacctgctctgcgttcaatgcctgcgcccactggcgggcagaccgttcaagtaatgtgtacaccgctgcaaacgtttcccggcttttgcgatacggatcggggatttcacattcgttatcccagtgaccaaacagcatcactttgccgcgcatctcaggtgccatctcgcataagcgttcgatatggcgcttttccatggtcaaaatcaggtcatagttgcgacacaggcggcggctgatttgtcgtgcacagtggccttccagagacagttgatgttctgcggcgacgctgatagcggtaggatcagcgcccttaccgaccagcgcgccgagtccagcggactccactttcagttccgggtgataacgttgcagtaagcgttccgccgtcggggaacggcaaatattgccgacacagacaactaatatgttgttaaacatgacgattaccagttatgaatgtcgctggctgtatccgtcatgtaacggacaccgctaatagttggcaacaactgattgatcagacggttccagcgggaaaccggggcggtggtgacatacaccacgtcataaggttgcaggcggaattctgtcgccatcaccagcgacgtggcatcggacatatccagctggtagatattggcaatcttgccattacgcccgccctcgcctttcagcggacgaatgacaaagatgccgctggcgttggaggtggtcatgtcgataccttcagcattacccagggcttcagtcagggtcatgccgctaaagtccattttcagggtgctctgtttcttcacttcacccatcacaaatactttcagatcatcattacgcggcacgtagagaatatcgccgggataaagcagtcggttctgattgaggtcgccgttttgcatcagcgcctgcaaagaaatgcgttcttcacgaccattgtgtgttagcactacgttgcgccagtcagcggtgtcggtcaggccacctgcggcgttgatggcgtcgagaatagtcagtggcacgttggtgatcgcctgttgaccggatttattcacctgaccggagatataggccttttgtgagcggaaggcggcgatattaacgtccacctgcgggtcagcgatgtacgtcgctaagcgcccggtaatatcactgcggatttcagcgagcgttttcccgactacgtgaaccttgccgatatacgggtaaaacatagtgccgtcaggctgtacccagttgccggtgtcgctggagctgcggtactgaccggctggcgtggtgagttccgggtgatcccagacggtgacattcagaacgtcgcccggcccgacgcgatactggtaattcgcgatctcgctttccagcgtcatattggggcgcgctacattcgggcgtgggcgtaattggtcaatcaggcgcggggtcagcggataaacattcaccattttgtcgagatcgaaatcagcgtcctgctgtttgatgacgtctttgcccatcgtcgacatattgctgcccggaagtactgtgcaaccgcttatcaaggttactgacaccaataatggcatcaatttcattttggatttcatcattgtttatttatcactttggcagagtaattatcctgtgcactattaatagcaatatcgccatgcacatttaccttgcagttaattgaataaaaatttaactggcatcagtcctaaaaaaattgatttcatccgcaggctattgacagaataattcagactggtctttcaggcatccagacacgctaccgcccctggctttttagccaccaatacactgatttagcttaatttttcaaaccctctctgcatacaatcgttgatgagaaagggttattgcggaaattaacttccgaatataaggtgacattatggtaattgaatattggctctccaataatgcaggaggaagtgttacagctaacggaatagcaggcaaggtaacaattcggcaattggctatttttaagaattatattaagtgtcattcaatatggtttttaggagtttctttaggttgacaatatttaatattgcgcctccacatgcgatatttcttaaataatgttttattattaccacttttaattcagggataatgtgaggttattaccctcaaataatatgagataaatagtgctgcaacattgcatttttgccccgatttatccatgatcgaattgtgacatttgtcatacaacgaataggttttgtacttactatggaatggattgccgatccgtctatctgggccgggttaatcacgctgattgtgatcgaactggtcctcggcattgataacctggtctttattgccatcctcgccgaaaaactaccgccgaggcagcgcgaccgcgcacgggttaccgggctgctgctggcgatgttaatgcgcctgttactgctggcgtcaatctcctggctggtcaccctgactcaaccgctgttcagcttccgctcgtttacctttagcgcccgcgacttaatcatgctgtttggtggtttcttcctgttgttcaaagccacgatggagctgaacgaacggctggaagggaaagacagcaataatcccacacaacgcaaaggtgcgaagttctggggcgtggtgacgcaaattgtggtactggacgccattttctcactcgactcagtgattaccgccgtcgggatggtcgaccatttactggtcatgatggccgccgtggttatcgctatcagcctgatgttgatggccagcaagccgttaacgcaatttgttaacagtcacccgacgatcgttattctctgcttaagcttcctgttgatgattggctttagcctggtggcagaaggtttcggcttcgtcattccgaaaggctacctgtacgctgccattggtttctcggtgatgatcgaggcgctcaatcagttggctatctttaaccggcgacgttttctttccgctaaccagacgctgcgccagcggactaccgaagcggtaatgcgcctgcttagcgggcaaaaagaagatgcggaactggacgccgaaaccgcgtccatgctggtggatcatggtaaccagcagatctttaatccgcaggaacggcggatgattgagcgggtacttaatcttaaccagcgtaccgtcagcagcattatgacgtcgcgccacgatattgagcatatcgatctcaacgcgccggaagaagaaatccgccagttgctggagcgaaatcagcatacgcggctggtggttaccgacggtgatgacgcagaagatttgctcggtgttgttcacgttatcgacctgctacaacagtctctgcgcggcgaaccgctcaacctgcgggtgttgattcgccagccgctggtgttcccggaaaccttgccgttgttacctgccctggagcagttccgtaatgcccgcacgcactttgcttttgtggtggatgagtttggctcggtggaagggattgtgacattaagtgacgtcactgaaaccattgtcggtaacttaccgaacgaagtggaagagatcgacgcccgccatgatattcagaagaatgcggacggttcctggacggcgaatggtcatatgccgctggaagatctggtgcaatatgtgccgctgccgctggatgaaaaacgtgaatatcacaccattgccgggctgttgatggaatatttacagcgtattccaaaacctggcgaagaagttcaggtgggggattatttgcttaaaacgttgcaggtggaaagccatcgcgtgcagaaggtgcagattattccgctgcataaggatggcgagttggagtacgaggtgtgatggtatcggtcattttacccaatagccgaaaggaataagatgagggaaccgcgccagcggcgatttaccgccgggagcccgggttgccagggtggtggcgattgagccaccctggcacgttcaccggcttgagcgttccatagtagcgaggaacatcaagtgaacggaacagccttcgatcttacatattcagaatataatgatgccgccacgaacgcctgatgcgacgctttacgcgtcttatcaggcctacaggactggtcacctggtaacctacatcttctccagcaacttcttcacatccttgccattgcgggaatctttattccgctcggcccagtcattcaggcgacgtttcgcttcgtcctgtagatgtttgcgcagtaactgatccacttgcaggctgtaattgagttgctgccagttgccataaacccgcagcggtactggcgtttctttcaggaaatcaatcagtttactttccccgttccagccacccacgacccgaatatcaaactgggtatcgcaggtttgatctgccagattcaacatgccttcccctgtcagcgccagcacaggcgattgaccttgcatgtcgtttaacgtcacgacgccatccttcaacgtcaaatcggtggtaaagcggtcaagccgcgtcacgttatcaaagttttcagcggccttcacatcaccgccattacgctctaccgcttgctgaatcatctgctggaagttcatcccttccatgcgcgtgtcggtcatttcgacatgtgcctgtccttgccagttgtggcggaatgcgtcggcatctatgtcagcaccggagaaatcaccagccagtgacatttttccggtcaacgaaatcggatagttaaacgccttcagaatggtaccaatctcaacgttttccagccgtggctggaagtttatccgcggatttattgatgtcgcgtccagcgtgcccggcagtgaaacctgtccaccgttaagtttgccctgcagttgagtaatttccagcaaacccgacttgttggtcatttgcgtggcaacatctgtaaaattcattccgcgccagcgcacgttactggcctgcaacaaaatatcagccgtaaagccttgcagtccctgataggccggttcatcaatacgcgaagaaatgaccgggcgcggcaacgttgattggctctgcccctgctgcgcggcaccgttttcaccattcgcggtttcattaagcgggatgaggttgtcaagattcagttgcgggaattgcagtctcagctgccattccggtttctctgtcagcgtgacctgtgcttgcccgctcagcgtactgtcattggcggtcaagctgatttggttaaatgaaaggcgtttatgtgactcctgccactgggcctggaaactcccctgcccctgaataccttgttttggtaaatcggcaccctgcaactgccagttaatttgttcaatagccgccgttaaatcatgcggataatcagaagcatccaccgtaccgttaagggatattgtgagatcgcgctgatcgcgattaacccgcccggagaactcaaatgagccacgatgttggggatcttgttccatttgcaggcggatattgcggattgtcacctgctcgtcatcttcatgctggaacaccagcacgctgtccgccaccttaagactggatatatcaaacgaccatccgcgatcgtctgacagatccggcaaggtattgtcgcgcggtgcaaccggagcgtcttcactgcgcaccgcttccgtctgcggcgtcagttggatcactgccccttttagcatcacctgcttaacgctcagttgatgactcagtagtggtaaaagcgccacgtccagacgcatgttgtcggcgcgaaccagtggctggcttgcgccctgggcggtgagagacattcgcccggagaggatactaagctgcggccagacgtgccaacgcagtggcccgtcgagctgcaattgataaccgctacgtgcagcaacttgcttgaccatatagtcgcggaaatcattcggattcaccagcaacactaacgcagataacccggccaccagcacgaccaggagtatcatcagcgtcgtcagaaatcgtctcatggtatcctcaatgggcctgaattagtctttatcgattcggctggctaccgcgccctgctggttgcgatatttcgcatcttcacggcggttgtaaggtcgcgccgccgggccggaaagcggctcaaagctcagcgcaccaattaacatgcccggacgcagcgccagcggcagcttaccggagttgtagaactccagcacaatgcaaccagaccagcccggatcgatacggtgcgcggtgacgtgcaccatcagccccagacgcgccaaagaggaacgcccgtccagccagcccaccagatcggctggcagcgtcaccgactccagcgtcaccgccagcgccagctctcctgggtgaagatagaacgcctcgccctcgtcgagaacgatctcatcgctcatcacgcggtcaagcgcggcgctcacttcatctttgggaccgctcagatcgataaacgctgccgtgtgaccacggaaggtacgaaatttattgcccaggcgtacatccaccgtcgcgccgttaatacgctccactggcggacgtgggttgatcgacaaacggccttcatcaagccaggcttcaatatctcggtcacacagacgcatggcattttctcctttcgcgcatcactcccttaacgccaattacgtcaagggcataccaggttatcactgaacggtacacaatttatcaagcttattcaaagaactgacttattttcgctttcaatatatcgatcgcgatgcggtttttcccgccgcgcggcacgataatgtccgcatattgtttagaaggctcaatgaattgcaggaacatcgggcgcacggttttttgatattgcgccatcacggaatccattgaacgcccacgctcgttaacgtcacgcttgatgcggcgcatcaggcagatatccagcggggtatcaacgaaaatggagaagttaagttcgtcacgcaaacgcgcatccgtcagcaacaaaatgccttcgagaatgatgaccttcttcggctcaaccgtcaccgtttctttcatacgcgtatgttcaacatagctgtaaaccggcaggtcaattgccgagccgcgtttcaacgcttgtaaatgctcaagcagcaggctgtgatccatcgcgctgggatggtcgtagttggtcttaacgcgttcttccatcgacagatggctttgatctttgtaatagcagtcttcgggaattacgccgatgtgttcatcaccgacttgctcacgtaattcacgataaagggtactggcaataagactcttgccggaagccgatgcgccagcgataccgataatgacgcactgatgagactgatcagtcatatatttagcgacctgattaacctggatgttaggaagggggcgacgaagcgccaaacgcggcaattatagggatttcatccgtctgataccagtcgaatagcgttgccgcgcgctcagagttaattgttgacaaagaattcccggtggcaaattacgttgatcagttttatgtaaggtaaaaaatgttatacgcagttgcgcaaattatccgcctttacgtcactttatgagcaattcgcatataaaatgtaaaacttttgtactagcataaacacagaaacgaatactggcgacctggtcttgcggataaagcggtaatgagcaaacaatcacagcatgtattaattgccctgccccacccgctgcttcacctggtcagtttaggtttagtctcgtttatctttacccttttctcgcttgagctttcgcagtttggcacccaactcgccccactgtggttcccgacgtccatcatgatggtggcgttttatcgccatgccgggcgcatgtggccgggaattgcgctgagctgttcgctgggaaatatcgccgcatccatcctgcttttttccaccagctcgctgaacatgacctggacgaccatcaatattgttgaagccgtggtcggggcagtgctgctacgtaaattgctgccgtggtataaccccttgcaaaatctggctgactggctgcgtctggcactcggcagcgccattgttccgcctctgttggggggtgttctggttgtcctgctgacgcccggagacgatcctctcagggcatttttgatatgggtactgtcagaatccatcggcgctctggcactggtgccgctgggattgttatttaaaccacactatctgctgcgccatcgcaacccacggttgctttttgagtcgctgctcacgttagccatcacactgacgttaagctggctttcgatgctgtatctgccgtggccttttactttcattattgtgctgttgatgtggagcgccgtgcgcctgccacgaatggaagcctttttgatcttccttaccacggtgatgatggtgtcgctgatgatggccgcggatccctccctgcttgctacgccgcgtacgtacctgatgagccatatgccgtggctaccgtttttgctgatcctgctgcccgccaacatcatgaccatggtgatgtatgcctttcgtgcggaacgcaaacacatttccgaaagcgaaacccgctttcggaacgcgatggaatattccgctatcggtatggcgttagtgggcaccgagggacaatggctgcaaaccaacaaagcgctctgccagtttctcgggtacagtcaggaagagctgcgcggactcacctttcagcaactgacctggccggaggatctcaataaagatctccaacaggttgaaaagctgataagcggtgaaataaacacctattcaatggaaaaacgctactacaaccgcaatggcgatgttgtctgggcgttgcttgccgtctcactggtgcgccacacggatggcacgccgctctattttatcgctcagattgaagacattaacgagctaaaacgcaccgaacaggtcaatcagcaactgatggagcgcatcacgctggctaacgaagcgggcgggattggcatctgggagtgggagttgaagccgaatgtttttagctgggataagcggatgttcgagctgtatgaaattcctccacatatcaaaccgaactggcaggtgtggtacgagtgcgtgctgccggaagatcgccagcatgccgaaaaagtgattcgtgattcgttgcaatcacgctcgccctttaaactggaatttcgcattaccgtaaaagacggtattcgccatatccgcgccctcgccaaccgggtactgaataaagaaggcgaagtcgaacgtctcctcggcatcaatatggatatgaccgaagtgaaacagcttaacgaggcattgtttcaggaaaaagagcgcctgcacattacgcttgattccatcggtgaagccgtggtctgtattgatatggcgatgaaaattacctttatgaatccagtggcggagaagatgagcggctggacgcaggaagaagcgttaggtgttccgctcctgacggtgttgcatattacttttggcgacaacggaccattaatggagaacatttacagtgccgacacctcacgttccgcaatcgaacaagatgtggtgttgcactgtcggagcggcggcagttacgacgtgcattacagtattacgccgttaagtactctggacggcagcaatattggttcggttctggtgattcaggacgtcaccgaatcacgcaaaatgctgcgccagctgagctacagcgcctcccatgatgcactgacgcatctcgccaaccgcgccagttttgagaaacaactgcgtatcctgctgcaaacggtaaacagtacgcatcagcgacatgccctggtgtttatcgatcttgatcgctttaaagcggtgaatgacagcgccgggcatgcggcgggcgacgctttgctgcgcgaactggcgtcgttgatgctgagtatgctgcgctccagtgacgtgctggcgcggctcggcggtgatgaatttggtctgctgctgccagactgcaatgttgaaagcgctcgttttatcgctacacgtattatcagtgctgtgaatgactatcactttatatgggaaggccgggtacatcgggtaggtgccagcgccgggattaccttgatcgatgacaacaatcatcaggcggcagaagtgatgtcgcaggctgatatcgcctgttatgcctccaaaaatggtggacggggccgggtgacggtttacgaaccacagcaagctgccgcacatagcgaacgggcggcgatgtcgcttgatgaacagtggcggatgattaaagagaatcagttgatgatgatcgcccacggtgtcgcttcgccgcggatcccggaagcgcgtaatttgtggctgatttcgcttaagctctggagttgcgaaggcgaaattattgatgaacaaacatttcgtcgtagcttcagcgatccggcacttagccatgctcttgaccgacgggtattccacgaatttttccagcaggccgccaaagcggttgccagtaaaggcataagcatcgccctccccctttccgttgccggtttgagtagcgccacgctggtgaatgatctgcttgagcagctggaaaatagccctctaccaccacggttattacatctgattattccggctgaagcgattttagatcacgcagaaagcgtgcaaaaactgcagctggcgggatgtcggatagtgctcagccaggtgggccgcgatctgcaaatcttcaactcgctgaaagcgaatatggcagattacctgctacttgatggtgagttatgcgccaacgtgcagggtaatttgatggatgagatgctgattacgattattcaggggcacgctcagcgactcgggatgaaaaccatcgccgggccagtcgttttacccttagtgatggatacgctttctggcatcggcgtcgatctgatttatggtgatgtgattgccgatgcccaaccgctggatttgctggtgaatagcagttatttcgcgattaactgagagagcgtttgcccattgcctgatgcgacgctaacgcgtcttatcatgcctacaaatcgctcattccccagaccggataaggcgctcgcaccgcatccggcgaccaacgtcatgcttcgtctggttgccagccttccgtataccagatatgcaacagcgcataagaacgccagggcttccagcgctcggcataacggcggatttgtgccggtgtcattcccggaaatcgccgtttaatcagataatcatccggcagaaaaacatctttcgcctgccagccacgcaaagcaaaataattcgccgtccagcgcccgatacccggaaaagtttgcagcgttttcatcgcctgctccacatcgcccggaattgtcattggtaagctgccctccagcgccgcatttgccagatgaatcagtgcctctgcccgtttcaacggcatgcctaacgcttttaatgcctgcgggtcggctgctgccagccgctgaggcgtggggaagcagatatactccggaaaatcatccagccgttcgccataaagctgtaccactttggcagtcaattttgccgccatcgccacgctcaccagttggcctaaaatcgcccgcacaccctgctcaaaagcatcaatacagccgggtaaacgcaatccgggccgccccgcgcctaactttcccaacgcaccgttaacaatctgcgggttacattgcagatcaagcaggcggctcattttcgccagacactctgcggcaacaggttctaaacctgcacttaaatttatgtgcagagtatggcgggctatatccggaatagcagtcactacgccgcgatattcgcccaccgccagactacgggcataataattgtccgcgaccgtttccacaccgctcaccgcacgggcggcgagaaatcccaacatccacgaccagtcatacggcggctgccagttcagggtatacatcgcatctccttgttaatccgctttcagcataaacgttattcagacgttacgctttgctttcatattccggttgtcgcgacagcaacatttcgctaaagtcacgccccttcttcaccggcatggggattaattcgtgtttattggttttgattacggtacagcaaactgttcagtggcggtcatgcgtgacggtaaaccgcaattactgaaaatggaaaacgacagcacgctgctgccttcaatgctttgcgcgccaacgcgtgaatcggtaagcgaatggctgtaccgccatcatgatgttccggcagacgacgatgaaacgcaggcgctgttacgtcgggcgattcgttataaccgcgaagaagatatcgatgttacggcgaaaagcgtgcagttcggtctttcctcactggcacagtacattgatgatccagaagaagtgtggtttgtgaaatcaccaaaatcgttcctcggtgccagcggcttaaaaccgcagcaggtagcgctgtttgaggatctggtctgcgcaatgatgttgcacattcgccagcaggcgcaggcgcagctgccagaagcgattactcaggcggtgattggtcgcccgatcaacttccaggggctgggcggcgatgaagcaaacgcccaggcgcaagagattctggaacgcgcggcgaagcgtgccggattcagggacgtggtattccagtacgagccgatcgcggctgggctggattacgaagccaccttgcaggaagaaaaacgggtgctggtggtggatatcggcggtggtacgactgactgttcattgctgctgatggggccgcagtggcgttcgcgtctcgatcgtgaagccagtctgctgggtcacagtggttgtcgtattggcggtaacgatctggatatcgccctggcgtttaaaaacctgatgccactgctgggtatgggtggcgaaaccgaaaaaggcatcgccctgccgatcctgccgtggtggaatgcggttgccatcaacgacgtacctgcgcagagtgatttctacagtagtgccaacggtcgtctgcttaacgatctggtacgcgatgcccgcgaaccggaaaaagtggccctgttacagaaagtctggcgtcagcgtttaagctatcgcctggtgcgtagcgcagaagagtgcaaaattgctctttcaagcgtagcggaaacccgcgcctcactgccgtttatcagcaatgaactggctacgctgattagccagcgagggctggaaagcgccctcagccagccactggcgcggattctggaacaggtgcaactggccctggataacgcccaggaaaaaccggacgttatctacctgaccggcggtagcgcccgttctccgcagattaaaaaagcgctggcagaacagttgccgggcattccgattgcaggcggcgatgactttggctccgtcaccgccgggctggcacgctgggcggaagtggtgtttcgttaattgaaaaatggctcagcagcggcttaaatctgcctgcgcctgagccagtttttctgctgcctgacgtaacggttccatcaacggcatggtccgtgctggagcatgaaggcggaatcgctgcaactctgtcgcgccgactgtcaacgccgattccagccgatgtcgtttggcggtcattttcgccattaccgcttgtctgtctgctggcgttatcgcttcattcggcctgaacacaaaacggcgttcacagttcgctttccagtcgataaccgcctgggtcagatggtcgccaaaccctttcacttgcttaacgccacgacgggtaacatctgcggctgtttcaataccaaaagaccgtaacgccgctttacgcgcagggccaacgccgggaatagaggcaacatcaataaaaaatccctccagaaacttctgcttctgccgttcccttgcagtgtcatgaagtgctgccagagcgcgtttctcttcttccggtaacccgagaatttcgtccttcattttttcgagcatcgtccgtttggcgataaaaccttccaggccgcctacctgctggatctggcggactaaatggtcatagtccattttcgcacgattaaatgcctcacggcgttgctgaacttctgctttgtacgctttgcttgtcaaactgccaataatccagatagccgccagcacaggaaccaaaataatataacgcggttctgcctgaaggccgcaaagcagcagcgataatgctgacagtgcgatctcaagcagaatgatgtattcgcgccgtaacaggcctaaaggaagcggcctgccagtcggttggaaatgatcgggtaatggcagttgcaatgctggcggtgctactgacgccatcaccatcgcccagacttttgccagcacaaaatccccgccggtggtaatgacctcttcgccgagatcaataaaatagataacaccttgattatccagcgcacaccatgggcagtcagccaaatgaccgggataaacatgcattgccgaaacggtacatttctttaactgttggcgtagagaatccagtgctgatacccacgctttagccgtcggacgcccggttgccacgccactttccgtaaacgcctgctgaaacatggcttcaacatcactcggtaacatcgatagcggaatcgatcgtggcggcggttttaaaccacgtcgctgattatctgacgcgtaggcataacggaaatgggtaatatccgtctccagcgcattacccgcatcagagataagcggcacaccagaataaggatgccggccaccaaacaagacgtgaaaaatcagcaacgcaaggccaaaattatcgtgattttctgtgcgttcaaagccgacaaatgacgacaaggtttgtagctctggcggcgtaaaatgcgacacgccgacttcgcataaatgcagtgtgccattggcgttaatctgaaaggagtcgctatcaatcaacaccactttgctgtcgcgacctaccataaaactgttctggtttacgtcacccacgacgtgcccgtgctcgtgaaccgtagcaaaagatgaagcaatattgcgcgcaacatagagtagaaaatcccacgcacaatgagggtaacgttgacgacgatgtgccgggctatagatcatatgaatcggttctttaccagaaacttttggcatcataaaaccgataacttttccgcctcgtccaccgtgaagcgttgcctgcggccaggcgacataattcaacaattgcgcgtcagctgtcgcagccataaaggcaagtttgtcctgttttaaggcgggtggcggcgtgtgataaatcttggcgacgctatcgacaaactcattgatatcataaaccgcgccttcaccgcctttgcccagttcacggcctggcgtaacgcactcaccagtagcagtatataaagtgggtttcatggtaaccacagcgccagtgccaacgttttatcatcatccgtacgctcgtttaccgccgggctggacaaaaactgctttaacaattcaggtaataaatcgagttgttcctgcgttgctgacgccagtccattgaaaaacggggtaaagaaaggcacatgaggagaattatccagcatatttaacgccagccgctgaataccatccgtaaatgctgcaactttatgcgcacgcccagtgctggtgaaagtttccagtctggaaacggcatcttcgtcggtaatgaagtgcgtcatgttggcatattcacccaccatcggcgtgagaggcaattgcagaccgtgacccaaatctaccaccacgccgccatcgccaatctgcataatcaaggtgccgtcaggcgatgaaatcaatcccagaaacgtgcaggcaaaatcgcgaactgctaatgctttggcttctgcctcggcaaaaagtcgttgacgaatagtcagtaccatatttgtggcgaggacatcattaagccccaattcaccgtcctgtactttttgcaccataaacgccatcgcttcattgacggcgagcgtcgcgccttctcctccctgcgaaacgctacctgcgccatcagcaaggaacatcaccagtaatggttgctggtcgtttaaccagacaacctgcatctggcaggcatcctgacaaggcaaatcagcactaatgtgcgatgttccaacagcggatgcataaaccagacgccagctcacactgacgtccagccttttggcgcttccagcacaacttccgttcccggcgtggagcgggaaaccgaacgcagcgaactggataaccagctaaacagttcacggaattgtaatccctgcagtggcaaaggctgacgaacgctgatttgtgccagagtcttcatatccgccccctgaacaccgatggaaaagaaggcaaacttcttatcttcttccccctgaaacactttgttggcggcagcctgccactcatcggttggagcgccatcggtgatcaggaaaatccacgggcgataatacgaaataccatttgcgcggtactcacgtttcctctcttcaaccatatccagggctttggtaatggcggcccccataggcgtatccccctgggcaaacaggatgggcgggaaaaagttagcggcgctggtaaagggttgttccacatgcaccgggccgaacgtcacaatgccgagttccactctttttaaagccagcggatcagcaagcagttcatcacgaaaggtaaccaatccggcgttaagttcattaataggtctgccgctcatcgagccagaaacatccagcagcaaaatgcaggggcaacgtggttccgggttactggcaaaatcgctggtggcaaacgtgatttgttcgctcataagaaatcctttcttagagaattatcgaggtccggtatcataccgattgcaataatgaaataagagcaaacgaagaaactttcagaattaggcccgtcggcgcagaaaattttgctattcgcctcgcaagaacggagagccgtcgattgacactaagggcggagtgacataatttcaggagtgagggttagggagaggtttccccctccccctggtgttcttagtaagcctggaagctaatcactaagagtatcaccagtatgatgacgtgcttcatcataaccctttccttattaaaagccctcttctccgggagagggtttcccgtttcagcgtcccgctgaaatcgtcggcttacctcctttcgccctgaatgcagtctatcgctaacgcgtgaacaaaatagtttcatctgtgattattgcgtaacgactcgcaaagaatatttgctggcaggatcgcagactacaaagcctgcggattgacaatcttatcgtgaaggcataatttcaggagtgagggtagagcggggtttcccccgccctggtagtcttagtaagcggggaagcttatgactaagagcaccacgatgatgagtagcttcatcatgaccctttccttattaaggccccttcctcgggaggggctttcccgtttcagcgtcccgctgaaatcgtcggcttacctcctttcgccctgtatgcagtctatcgctgacttgcggataaaatagtttccagtgtgattattgcgtaacgtctcgcaaagaatatttgctggcaggatcgcagactgcaaagcctgcagattgacaatcttatcgtgaaggcatactttcaggagtgagggtagagcggggtttcccccgccctggtagccttagtaagctggccagctaatgactaagagcaccacgatgatgagtagcttcatcatgaccctttccttatttatggccccttcctcgggaggggctttcccgtttcagcgtcccgctgaaatcggcggcttacctcctttcgccatgcaagcagtctatcgctaacgcgtagataaaatagtttcctgtgttattactggatgcgtgctcgcaaatgtgcccgtcattcagacgattcccgacagtgtttcataattcctccatttttctcccttattggctggctacactagtatcattccgcgaaacgtttcaggaagagaaactcttaacgatgaaaggcagttataaatcccgttgggtaatcgtggtggttatcgccgccatcgccgcattctggttctggcaaggccgcaatgactcccagagtgcagccccaggggcgacgaaacaagcgcagcaatcgccagcgggtggtcgccgtggtatgcgttccggcccattagccccggttcaggcggcgaccgccgtagaacaggcagttccgcgttacctcaccgggcttggcaccattatcgccgctaatactgttacggtgcgcagccgcgtggacggtcaactgatggcgttacatttccaggaaggccagcaggtcaaagcaggcgatttactggcagaaattgaccccagccagttcaaagttgcattagcacaaacccagggccaactggcaaaagataaagccacgcttgctaacgcccgccgtgatctggcgcgttatcagcaactggcaaaaaccaatctcgtctcccgtcaggagctggatgcccaacaggcgctggtcagtgaaaccgaaggcaccattaaggctgatgaagcaagcgtcgccagcgcgcagttgcaactcgactggagccgcatcaccgcaccagtcgatggtcgcgttggtctcaagcaggttgatgttggtaaccaaatctccagtggtgataccaccggaattgtggtgatcacccagacgcatcctatcgatttagtctttaccctgccggaaagcgatatcgctactgtagtgcaggcgcaaaaagccggaaaaccgctggtggtagaagcctgggatcgcaccaattcgaagaaattaagtgaaggcacgctgttaagcctcgataaccaaatcgatgccacaaccggtacgattaaagtgaaagcacgctttaataatcaggatgatgcgctgtttcccaatcagtttgttaacgcgcgcatgttagtcgacaccgaacaaaacgccgtagtgatcccaacagccgccctgcaaatgggcaatgaaggccattttgtctgggtgctgaatagcgaaaacaaggtcagcaaacatctggtgacgccgggcattcaggacagtcagaaagtggtgatccgtgcaggtatttctgcgggcgatcgcgtggtgacagacggcattgatcgcctgaccgaaggggcgaaagtggaagtggtggaagcccagagcgccaccactccggaagagaaagccaccagccgcgaatacgcgaaaaaaggagcacgctcctgatgcaggtgttacccccgagcagcacaggcggcccgtcgcgcctgtttattatgcgtcctgtcgccaccacgctgctgatggtggcgatcttactcgccgggattatcggttatcgcgccctgcccgtttcggcgctgccggaagtggactatccgaccattcaggtggtcacgctctacccaggtgccagcccggatgtcatgacctctgccgttaccgcgccgctcgaacgccagttcgggcagatgtctggcctgaaacagatgtcgtcgcaaagttccggcggtgcgtcagttatcactttgcagttccagctaacattaccgctcgatgtcgccgagcaggaagtgcaggccgcgattaacgctgcgaccaacttgttgccgagcgatctgcctaacccgccggtttacagcaaagtgaacccggcagatccgccgatcatgacgctcgccgtcacctcaaccgccatgccgatgacgcaagtggaagatatggtggaaacccgcgtcgcgcagaaaatctcgcagatttccggcgtcggcctggtgacgctttccggcggtcagcgtccggctgttcgcgtcaaacttaacgctcaggcgattgccgccctcggcctgaccagcgaaaccgtgcgcaccgccattaccggcgctaacgttaactcggcaaaaggtagcctcgacggcccttcccgtgcagtcacgctttccgcgaacgaccagatgcaatccgccgaagagtatcgccagctaatcatcgcctaccagaacggcgcgccaattcgtctgggcgatgtcgcaactgtagagcaaggtgcagaaaacagctggctcggcgcgtgggcgaacaaagaacaggccattgtgatgaatgttcagcgccagcccggtgctaacattatctccaccgccgacagcattcggcagatgctgccacagctcactgagagtctgccgaaatcggtgaaggtgacagtgctttccgatcgcaccaccaatatccgcgcatccgtcgatgatactcagtttgaattgatgatggctatcgcgctggtagtcatgattatctacctgtttttgcgcaatattccggcgaccatcattcccggtgttgctgtaccgctgtcgttaatcggcactttcgcggttatggtgtttctcgatttttcaatcaataacctgacactgatggcgttaactatcgccaccggattcgtggtcgatgacgccatcgtggtgatcgaaaacatttcccgctatatcgaaaaaggcgaaaaaccgttggcggcggcgctcaagggcgcaggtgaaatcggctttaccattatctcgctgaccttctcactgattgcggtgttgatcccactgctgtttatgggcgatatcgtcgggcgactgttccgcgaatttgctattaccctggcggtagcgattttgatctcagcggtggtgtcgctgaccctgacaccgatgatgtgcgcgcggatgctcagccaggagtcgttgcgtaaacagaaccgcttctcccgtgcctcggaaaaaatgttcgacaggataatcgccgcctatggtcgtggactggcgaaagtgctgaatcatccgtggctgaccttaagcgtggcactcagcacgctgctgcttagcgtgctgctgtgggtgttcattccgaaaggtttcttcccggtacaggacaatggcattattcagggcactttgcaggcaccgcaatccagctcctttaccaatatggcccagcgacaacgccaggtcgcggacgtgattttgcaggatccggcagtgcaaagcctgacctcatttgttggcgttgatggcactaacccgtcgctgaatagtgcacgtttacaaatcaacctcaaaccgttggatgaacgtgatgatcgggtgcaaaaagtcatcgcccgtctgcaaacggcggtagataaagtgccgggcgtcgatctcttcctgcaaccaacgcaggatctgactattgatactcaggtcagccgcacccagtaccagtttaccttgcaggccacctcactggatgcgctcagtacctgggtgccacagttgatggaaaaactccagcaactgccacagctttctgatgtctccagcgactggcaggaccaagggctggtggcgtatgtcaatgttgatcgcgacagcgccagccgtctggggatcagcatggcggatgtcgataacgccctgtacaacgcgtttggtcagcgactgatttccactatttatactcaggctaaccagtatcgcgtagtgctggagcacaacaccgaaattaccccgggcctcgcggcgctggataccattcgcctgaccagtagcgacggcggcgtggtgccgttaagctcaattgccaaagttgaacagcgttttgcgccgctttccatcaaccatctggatcagttcccggtaacgaccatctcctttaacgtgccggataactattcgctgggcgatgcggtgcaggagattatggacaccgaaaagacgctgaatctgccggtggatatcaccacgcaattccagggcagcaccctcgccttccagtcggcgctgggcagcactgtctggctgattgtcgcggcggtggtggcgatgtatatcgtgctcggcattctgtacgagagctttattcacccgatcaccattctctcgacgctacccaccgcaggggtcggcgcgctgctggcattaatgattgccggtagcgaactggatgtgattgcgattatcggcattattttgctgatcggtattgtgaagaagaacgccatcatgatgatcgacttcgcgctggctgctgagcgcgagcaaggcatgtcgccgcgcgatgcaatctaccaggcttgtctgttgcgttttcgtccgatcctgatgaccaccctggcggctctgcttggcgcgctgccgctgatgttgagtaccggggtcggcgcggaactgcgtcgtccgttaggtatcggcatggtcggcggtctgattgtcagccaggtgctgacgctgttcaccacgccggtgatttatctgctgttcgaccgcctggcattgtggaccaaaagtcgctttgctcgccatgaagaggaggcgtaagtgaagttttttgccctcttcatttaccgcccggtggcgacgattttactgtcggtcgccattaccctgtgcggcatactgggcttccgtatgctgccggtcgccccgctgccgcaggtcgattttccggtgattatggtcagcgcctcgctgcccggtgcgtcaccagaaacaatggcgtcttccgttgccacgccgctggagcgctcgcttgggcgcattgccggggtcagcgaaatgacctccagcagttcgctcggcagcacacgtattattttgcagtttgattttgaccgggacatcaacggcgcagcgcgtgatgtgcaggcggcgatcaacgctgcacaaagtttgctgcccagtgggatgcccagccgtccgacctatcgcaaagcgaacccgtcggatgcgccaattatgatcctcacgctgacatccgatacttattcgcagggtgaactgtacgatttcgcctcgacgcagctggctccgacgatttcgcaaatcgacggtgttggtgatgtcgatgtcggaggcagctcactgcccgccgtacgcgtcgggctgaatccgcaggcgctgtttaatcagggcgtgtcgctggacgacgtacgcaccgccatcagcaatgccaacgtgcgtaaaccgcagggcgcgctggaagatggcactcaccgctggcagatccagaccaatgatgagctaaaaaccgccgctgaatatcagccgttgattattcactacaacaacggcggcgcggttcgtctgggcgatgtggcgacggtgaccgactcagtgcaggatgtgcgcaacgccgggatgaccaacgccaaaccggctattttactgatgatccgcaaactgccggaagccaatattatccagacggttgacagcatccgggcaaaattaccggagttgcaggaaaccattccggcggcgattgatctgcaaattgcccaggatcgctcccccaccattcgcgcctcgctggaagaagtcgagcaaacgctgattatctcggtggcgctggtgattctggtggtgtttttattcctgcgctcgggtcgcgccactattattcccgccgtttcggtgccggtttcgctgattggtacgtttgcggcgatgtacctgtgcggattcagtctcaataacctttcgttaatggcgctcaccatcgctactggtttcgtggtggatgacgccatcgtggtgctggaaaacattgcacgtcatctggaagcgggaatgaaaccgttgcaagccgcactgcaaggtactcgcgaagtcggttttacggtgctgtcgatgagtctgtcactggtggcggtgttcctgccgctgctgttgatgggcggattgccgggccgactgttacgcgagtttgccgtgacgctttctgtcgccattggtatttcgttgctggtttctctgacattaacgccaatgatgtgtggctggatgctgaaagccagcaagccgcgcgagcaaaagcgactgcgtggttttggtcgcatgttggtagccctgcaacaaggctacggcaagtcactgaaatgggtgctcaatcatacccgtctggtgggcgtggtgctgcttggcaccattgcgctgaatatctggctgtatatctcgatcccgaaaaccttcttcccggagcaggacactggcgtgttgatgggcgggattcaggcggatcagagtatttcgtttcaggcgatgcgcggtaagttgcaggatttcatgaaaattatccgtgacgatccggcagtggataatgtcaccggctttacaggcggttcgcgagtgaacagcgggatgatgtttatcaccctcaagccacgcgacgaacgcagcgaaacggcgcagcaaattatcgaccgtctgcgcgtaaaactggcgaaagaaccgggggcgaatctgttcctgatggcggtacaggatattcgcgttggtgggcgtcagtcgaacgccagctaccagtacacgttgttatccgacgacctggcggcactgcgcgaatgggagccgaaaatccgcaaaaaactggcgacgttgccggaactggcggacgtgaactccgatcagcaggataacggcgcggagatgaatctggtttacgaccgcgacaccatggcacggctgggaatcgacgtgcaggccgccaacagcctgttaaataacgccttcggtcagcggcaaatctcgaccatttaccagccgatgaaccagtataaagtggtgatggaagtggatccgcgctatacccaggacatcagtgcgctggaaaaaatgttcgttatcaataacgaaggcaaagcgatcccgctgtcgtatttcgctaaatggcaaccggcgaacgctccgctgtcggtgaatcatcagggattatcggcggcctcgaccatctcgttcaacctgccgaccggaaaatcgctctcggacgccagtgcggcgatcgatcgcgcaatgacccagcttggtgtgccttcgacggtgcgcggcagttttgccggaacagcgcaggtgttccaggagacgatgaactcacaggtgatcctgattatcgccgccatcgccacggtgtatatcgtgctgggtatcctttacgagagttacgtacacccactgacgattctctccaccctgccctcggcgggcgttggtgcgctgctggcgctggagctgttcaatgccccgttcagcctaatagccctgatagggatcatgctattaatcggcatcgtaaagaaaaacgccattatgatggtcgattttgcgctcgaagcccaacggcacggtaacctgacgccgcaggaagctattttccaggcctgtctgctgcgttttcgcccgattatgatgactaccctggcggcgctgtttggcgcgctgccgctggtgttgtcgggcggtgacggctcggagctgcggcaccccctggggatcaccattgtcggtggactggtaatgagccagcttctgacgctgtataccacgccggtggtgtatctctttttcgaccgtctgcggctgcgtttttcgcgtaaacctaaacaaacggtaaccgagtaaatgacagaacttcccgacagcacccgctggcaattgtggattgtggctttcggcttctttatgcagtcgctggacaccaccatcgttaacaccgcccttccctcaatggcgcaaagcctcggggaaagtccgttgcatatgcacatggtcattgtctcttatgtgctgaccgtggcggtgatgctgcccgccagcggctggctggcggacaaagtcggcgtgcgcaatattttctttaccgccatcgtgctgtttactctcggttcactgttttgcgcgctttccggcacgctgaacgaactgttgctggcacgcgcgttacagggcgttggcggtgcgatgatggtgccggtcggcaggttgacggtgatgaaaatcgtaccgcgcgagcaatatatggcggcgatgacctttgtcacgttacccggtcaggtcggtccgctgctcggtccggcgctcggcggtctgctggtggagtacgcgtcgtggcactggatctttttgatcaacattccggtggggattatcggtgcgatcgccacattgctgttaatgccgaactacaccatgcagacgcggcgctttgatctttccggctttttattgctggcggttggcatggctgtattaaccctggcgctggacggcagtaaaggtacaggtttatcgccgctggcgattgctggcctggtcgcagttggcgtggtggcactggtgctttatctgctgcacgccagaaataacaaccgcgccctgttcagtctgaaactgttccgcactcgtaccttttcgctgggcctggcggggagctttgccggacgtattggcagtggcatgttgccctttatgacaccggttttcctgcaaattggcctcggtttctcgccgtttcatgccggactgatgatgatcccgatggtacttggcagcatgggaatgaagcgaattgtggttcaggtggtgaatcgctttggttatcgtcgggtactggtagcgaccacgctgggtctgtcgctgatcaccctgttgtttatgactaccgctctgttgggctggtactacgttttgccgttcgtcctgtttttacaagggatggtcaactcgacccgtttctcctccatgaacaccctgacgctgaaagatctcccggacaatctggcgagcagcggcaacagtctgctgtcgatgattatgcaattgtcgatgagtatcggcgtcaccatcgccgggctgttgctgggactttttggttcgcagcatgtcagcgtcgacagcggcaccacacaaaccgtctttatgtacacctggcttagcatggcgtttatcatcgcccttccggcgttcatctttgccagagtgccgaacgatacgcatcaaaatgtagctatttcgcggcgaaaaaggagcgcgcaatgaagttctggcgacctggtattaccggcaaactgtttctggcgattttcgccacctgcattgttttgctgatcagtatgcactgggcggtgcgtatcagttttgagcgtggctttattgattacatcaagcatggtaatgaacagcgattacaactgttaagtgatgcgcttggcgagcagtatgcgcagcatggcaactggcgcttcctgcgcaacaatgatcgctttgtctttcagatcctgcgttcatttgaacacgataattcggaagataaacccggcccgggtatgccaccgcacggctggcgtacccagttctgggtggttgatcaaaacaacaaagtgctggttggtccgcgagcgccgattccacctgacggtacacggcgacccattctggtcaacggtgcggaagttggcgcggtgatcgcctcccccgttgagcggttaacgcgcaatactgatatcaatttcgataaacaacagcggcaaaccagctggttgattgtcgccctggcaacgttactcgcggcacttgccacttttctgctggcgcgcggtttactggcaccggtaaaacgacttgtcgatggcacgcacaaactggcggcgggcgatttcactacccgcgtaacgcccaccagtgaagatgaactgggcaaactggcgcaagacttcaaccagcttgccagcacactggagaaaaaccagcaaatgcggcgcgattttatggccgatatttctcacgaactgcgtacgccattagcggtgctgcgcggtgaactggaagctattcaggatggcgtgcgcaaattcacgccggagacggtggcgtctttacaggcggaggtcggtacactgaccaaactggttgacgatctccatcagttgtcgatgtctgatgaaggcgccctcgcctatcaaaaagcaccggtagatttgatcccactgctggaagtggcgggcggcgcatttcacgaacgattcgccagccgtggcctgaaactgcaattttccctgccagacagtattaccgtatttggcgatcgcgaccgtttaatgcagttattcaataatttacttgaaaacagcctgcgctacactgacagcggcggcagcctgaaaatctctgccgagcagcacgacaaaacggtgcgcctgacctttgccgacagtgcgccaggtgtcagtgacgagcagctacaaaaattatttgaacgtttttatcgcaccgaaggttcccgcaaccgcgccagcggtggttccgggctggggctggcgatttgcctgaacattgttgaagcacataatggccgcattattgctgcccattcgccttttggcggggtaagcattacagtagagttaccgctggaacgggatttacagagagaagtatgaccgagttaccaatcgacgaaaacacaccgcgtattttgatcgtggaagatgaaccgaagctggggcagttgctcattgattatctgcgtgctgcgagctatgcgccgacgcttatcagccacggcgatcaggtactgccgtatgtgcgccagacaccaccggatctgatcctgttggatctgatgctccctggcaccgatggcttgacgctgtgccgggaaattcgtcgtttttctgacattcctatcgtgatggtgacggcaaaaatcgaagagatcgaccgcctgctcggactggagattggcgcagatgactacatctgcaagccgtacagcccacgggaagtggtagcgcgcgtcaaaaccattttgcgccgttgcaaaccgcagcgcgaattgcagcaacaggatgccgaaagcccgttgattatcgacgaaggtcgttttcaggcttcatggcgcggtaaaatgcttgacctgacgcctgcggaatttcgtctgttgaaaacgctctctcatgaaccaggaaaagtgttctcccgcgagcaattgctcaatcatctttatgacgactaccgcgtagtaaccgaccgcaccattgacagccacattaaaaacctgcgccgcaagctggaatctctcgacgccgaacagtcatttatccgcgccgtttacggcgttggttaccgctgggaagccgacgcctgccgcatcgtttagttttagcgacatgactttgttagccggagatggcgttcagaccagatccggcaacattatcccacgcatggtcagcaaactgacatggtgatgctgccaacttactgatttagtgtatgatggtgtttttgaggtgctccagtggcttctgtttctatcagctgtccctcctgttcagctactgacggggtggtgcgtaacggcaaaagcactgccggacatcagcgctatctctgctctcactgccgtaaaacatggcaactgcagttcacttacaccgcttctcaacccggtacgcaccagaaaatcattgatatggccatgaatggcgttggatgccgggcaactgcacgcattatgggcgttggcctcaacacgattttacgtcacttaaaaaactcaggccgcagtcggtaacctcgcgcatacagccgggcagtgacgtcatcgtctgcgcggaaatggacgaacagtggggctatgtcggggctaaatcgcgccagcgctggctgttttacgcgtatgacagtctccggaagacggttgttgcgcacgtattcggtgaacgcactatggcgacgctggggcgtcttatgagcctgctgtcaccctttgacgtggtgatatggatgacggatggctggccgctgtatgaatcccgcctgaagggaaagctgcacgtaatcagcaagcgatatacgcagcgaattgagcggcataacctgaatctgaggcagcacctggcacggctgggacggaagtcgctgtcgttctcaaaatcggtggagctgcatgacaaagtcatcgggcattatctgaacataaaacaccatcaataagttggagtcattaccaactgacattatctctccgccctggcaggcatcagaaaatcgctcatactttaatcggtaaacagcacctttagatgctgttttcgatacgcaatttcaatcaaggagtcattatggctggttggtttgaactcagtaagagcagtgataatcagttccggtttgtgctaaaagcgggcaatggtgagactatcctcaccagcgagctgtatacatcaaaagcctctgcggaaaagggcatcgcgtcggtgcgtagcaacagcccgcaagaagaacgctatgagaaaaaaacggcaagtaacggcaaattctatttcaatctgaaagccgccaatcatcaaattatcggctccagccagatgtacgccaccgcgcaatctcgtgaaaccggaattgcctccgttaaagccaatggcacaagccagacggtgaaagacaatacgtaattacgatgccgggcgtgggttgtcggcgtccggcgctttaccagatccccccacagcgctacaatgcccgcccttaaagtgggggcactcccctaaccgcttcatcaggtgaagcggagctgacctgtcatcagaacgagagaattatgtttaaaccggaactcctttccccggcgggaacgctgaaaaatatgcgttacgctttcgcttatggcgcagatgctgtttatgcgggccagccgcgttactccctgcgtgtgcgcaacaacgaattcaaccacgaaaatcttcagctcggcatcaatgaagcccacgcgctggggaaaaagttttatgtcgtggtcaacattgcaccgcacaacgccaagctgaaaacctttatccgtgacctgaaaccggtggtggaaatggggccggatgcgctgattatgtccgatccagggctgattatgctggtgcgtgagcacttccctgaaatgccgatccacctctcggtgcaggctaacgccgtaaactgggcgacggtgaaattctggcagcaaatgggcctgacccgcgtgatcctctctcgcgagctgtcgctggaagagattgaagagatccgcaatcaggtgccggatatggagattgagatcttcgttcacggtgcgctgtgcatggcctactccggtcgctgcctgctctctggctatatcaacaagcgcgatccgaaccagggtacctgcaccaacgcctgccgctgggagtacaacgtccaggaagggaaagaagatgacgttggcaacatcgtacacaagtacgagccgattccggtgcaaaatgttgagccgacgctaggtatcggcgcgccaaccgacaaagtgtttatgatcgaagaagcccagcgtccgggcgagtatatgaccgcgtttgaagatgagcacggcacttacatcatgaactcgaaagatctgcgcgccatcgcccatgtagaacgcctgaccaaaatgggcgtgcattcgctgaaaatcgaaggccgtactaaatctttctactattgcgcacgcaccgcacaggtttatcgtaaagctatcgatgatgccgctgcgggcaaaccgttcgataccagcctgctggaaactctggaaggtctggcgcatcgtggctataccgaaggtttcctgcgtcgtcatactcacgacgattatcagaactacgaatacggttattcagtttctgaccgccagcagtttgttggtgagtttaccggtgagcgcaagggggacctcgcagcggtagcggtgaaaaataaattctccgttggcgacagccttgagctgatgacgccgcaaggcaacattaactttacccttgagcacatggaaaacgccaaaggtgaagcgatgccggtcgcaccaggcgatggttatactgtgtggctcccggtcccgcaggatcttgagctaaattacgcgctgctgatgcgtaatttctccggggaaaccacgcgtaacccacacggtaagtgattaatttcgattatttttcccggatggaaaattcttagaaaccgatcacatacagctgcatttattaaggttatcatccgtttcgctgaaaaacataacccataaaatgctagctgtaccaggaaccacctccttagcctgtgtaatctcccttacacgggcttattttttatgcataagccctatccctggtcaccgtcttccattgaccacatcgatagaatctcccttcatagcacgatgcctttcacgtaacggcatcgtgctcgcacaggttccggctaagcacaaccagaacgcgcatgtttgatgcttaccaaaaaatattctcactctccacatttgaatgtcagacgagcgacgccatgtaatcctgcaccttctgtcttcaggtcaactatctgcatttttttgccctgagtaacacagaaatgggctgcatcattttttactatattttctgcaccagatattctgcccctagctaaagaagcttcggcttcggtgtagtattggttatcgagtttacgctgaatattacttttatatgcaagaccaaatttaccgatacttgtttcatcattatgcacagcacaaccagatataagaaaaatactaattaatgatatagcagctatctttttcatctcaccttcccccattaaataccaacgacactctctagtgtttaaatataataatggcatgattattataattgaataggattataataaatgttctgtacaacatttcctacataagtaggaattacggacattgaggcccttcagggtaactccatgggggctttaatatattatattgaagatgccactgtttagttgaatattaggtatatgctcttttttgaaatttatcggtggcagccgttagtattcgctgtccccattgcaagctcctggtggtaaccactgaatcctccatacttgaactgactttttatcctccgactttcatcctgttctgactccaccttttgttttctgctctacactatctacagaccaatcataaaggcacatacgatcatggcagaatttcccgccagcttactgattcttaatggcaaaagtactgacaatctacccttgcgcgaagcaattatgctgttgcgtgaggaaggaatgacgatccatgtgcgggtcacctgggagaaaggcgatgccgcacgatatgtagaggaggcccggaagttgggcgtcgcaacggtgattgccggtggtggcgatggcaccattaatgaagtttctacggcgttgattcagtgtgagggggatggcatacccgcgctgggaattttgccattaggaaccgccaatgattttgccaccagtgtagggattcctgaggcactggataaggcgctgaaactggcaattgccggtaacgccattgcgatagatatggcgcaggtcaacaaacaaacctgttttattaatatggcgacaggcggatttgggacgcgtattaccacagaaacgccggaaaaattaaaagccgcgctgggtggcgtctcttacatcattcatggcttaatgcgcatggatactctgcaaccggaccgttgtgaaatccgcggtgaaaactttcactggcaaggtgacgccctggtcattggtattggtaacgggcgtcaggccggtggcggtcagcaattgtgtccgaacgcgttaattaacgatggcttgctgcaactgcgcatttttaccggcgatgaaattcttccggctctcgtatcaaccttaaaatctgacgaagataacccgaatattatcgaaggcgcttcgtcgtggtttgatatacaagccccacacgaaatcacttttaatcttgatggcgaaccgttgagcggacaaaactttcatattgaaatacttccggcggcgttgcgttgtcgattaccaccagattgtctattattgcgttaatcaaactattctctcttgaaccagggagaatccgaaatgccggatgcggtgtaaataccttatccggcatacagaacaatactacaccgtaattaattttacccgtgtcttctgcaatgccagtttatccacctctgatacagcatcatcggtaataataatgtcaattttttcgattggcagtacctgattaaaaccgcgacggttaaatttcgatgaatcgagaacggcaatcactttattagcggcggtgaccatcgcaccgctaatcgaataaccttcattaaaggtcgtaataccattaaccgcatcaataccatcagcaccgacaaacattaaatcggcattaatatcctgcaatgaacgctcggcaatggaaccatgcatcgagcgcgttttatggcggaccgtgccaccacagacgaccagagtaatgtctttattttcggaaagggcaaacgctgccgggagactgttggtaatcaccgtgatatttttagcggtcattaatccttcggcgataagcattgtcgtacttccgctgtcgagaataacggtcatcccttcatggatcattttgactgccgcctgcgctattctgttttttggcgcgctggcgagctgaaatcgctctttaaacccgacttcctgggtctcggtttcactattaccggacattattttcgccgcaccgccatgaaagcgcgtaaccacgcctttttgttcgagaaagcgcaaatcggcacggattgtcgcttccgaggcagcaaatactcccgccagatcctgaacaagcacggttccctgttcattcactaattggatgatcttattccttcgctcgaatgaattcatcgtcatttacccatattcaattgtggctagtgtaaacgaagggggaccattggtgaatgatctgttttgcacaataccgggccagcatcacgctggcccgcggtttcatggaatgagcaacactttgcccggcatggcattacgagcgatgtcacgcaccgcctgggtgaagctttcaaagcttccacggtgagcgattaatggctccaggcttaacttacgttctgtcagcaaccggctcgccgtttcccactcctgccccggccaagggctggaatagttcatccaactgccgataaccgtcagctctttacgcaatattttgccaaacgttgccgatgttaaatgcagatcctgatgcaacgtgcccaccagcgccagttgggcatgaggaccggcaatctctaccgccagttcgacagtttgcggtacgccagccgtctcgaggataagctgattaaagcgcagttcgcgtaaaacgctctgcatttgcggcgcgctcatttcgctactgttaaatgtttgcatcgcaccgaaagattttgccaatgccagtttttctgagctaatgtcgatcgccgtcacactctttgctcccagcgcgacagcgcactgaatagccagcaggccaatggttccggcaccaataataataacgtttttattctcacaaccttgcgctaaatgaaaagcatgcaggccaacggtaatcggctcaataaaagccccatcctcaataggcatatccgtgggtagagcaaagacattttttcgcttaacgacaatatattcagcaaatccaccatcacgccgcgagccaataaaatcatattttgcgcactgggaataaaaccctttcaaacactctggataagtaaaacagggtaataacggcacacaggcaaccgcatcgccagggtgtaaatcatcaacaccggatcccaccgcatcaatatagccgctaaattcatggcctaacgttattggataataatgtgcaccatttttaaatatcctgggtaaatcggaaccacataagcccgagctggcaatttttacccgcacctcatcctgatgtttaatttcaggaatgacgctttctgcaacgcgcacgataccatcagtatcattcaccattgatttcataaaaactcctgattgttaagggggataacctccccctcaggtaaaaattattctgcgagaacggttttctcttgtttaataaaaccacgcgctctacgccaggtcatgaaaataccggtaagataaattgcgccgataataatgaaaccgggaatattttgcgtggagaaaacctgaatcagtaaccaggtaatgggagaaccgccctgatccattgaagccaccatacccccggcttttaacgccccagcattagccgccagttgggtgtgcaaaccaatagtttgcgtcgcgatccacagggtgatgctcataatgatgacacccgagattaaggtgcggaacagatttccacgatgcaccgcgaccgccatcgccacgaagaagccgatggtggcaagatcgccaaacggcagtacctgattacccggaacacaaacagcaattaaaatggtgagcgggataaaaatcaggcttgccgataccaccgccgtatgccccagcagtaatgcgggatccaggccaatcaggaactcctgaccgccgaacttcgcctgtaaacgactacgggcctgcttagcgatgggcgttaaaccatccatgatgggtttaatcacccgtggcatcagcagcataactgccgccgtttttaccgccagctgcaatacacctttgacatcgtaacccgcgaggatgccgataatcagccccatcacaaaacccacggtgacaggctcgccaaatggaccaaatttgcgctgaatatcgtcggcgctaaatttaattcggttaacgcctgggattttctcgatgatagcatcgaccagcaccgcaatcggccccatatacgccgacgtaccgtgcggaatagcaataccttccagctcaaagaaatttcgggtatcgcgggcaaaccagtcgccgagcttataaacaaacgccgcgtgaattaccacacctgccatccctatcatccatgaaccggttgccagatgcagcaacgcgccggtgaaggtcatatgccagatattccagatatcaacatttaccacccgcgtcatacgggtcagtaacatcgccacgttaaccagaatcgcaatcggaatcgccaccagcgcaatttgcgacgcccaggtcattggtgaagagcccggccagccgacatcgaccacatgcagattcaggtcgaaattttccgccatcgctttcgccgccggaccaatggaatccagcattaagccaatcacaaggccaatgccaacaaagccaatcccgatatgcagacccgctttaaagcaatcgcctgccttcatgcctaatattttagaaaaaataatgatgacaatcggaagcatcaccgtagggccgaggtcgagaatataacgcatgacttctgaaaacataggtcacccctgtaagatagtcagaattttattttgtaatgcttcgataccgacaccagaaataaaaggcatgccgtgaactaacggaatatcgccaaaactacgatccactttggcagtggtgcatatcaaatgcacaccatccatataggtttctatttcattaacccgacactggattaattcaacaggaatactatgattctgacacaactctttaatttcttccgccgccatcgtagaggtcgcaaccgcgcctccgcaagcgacaataatcttgcgtttcataaatagtcctttttattgttacagagggatttattcgtctgaatctaaaacatactttgtgaagtattcctttaactgggtttcaggaagagtgattagtgtctcgacgatatcgggctgttgtaacttgccaaataaacagcgtaaaagtttcaattgctgctgcggattctccacaatcaacgcaataaccaacgatacctccacgtcgttatcatcatccgcttgctgaaaatgaactttatttgttggccttaacagataaatggctgacgacttagcatgaatcgcctcacaatgcggtattgcaatggcgtgctgctcaagcattatcccggtagggaattctgcttctctggcaattaatgcctgtggccaggtatcatgaaccacacctttggcgagcatctcattaccgatatgggttaaaacttcgctacgatcgacaaaagaaattccgctacgaacaaacaggttagtcatataccgtccttattccgcacagccgtagcgataggcgcgcaaaacatcataaattttatccataatcagctgatgcggtattgctgataattccccggactgaatgcgttcaaattgtttgggaagatactgactaatcatgcccagtgggatgtccacgccttcaagattcaccatcatcgtttcgacgctatttttaatccgactatgcggccagtaataacgaatacgatccgacaggctgtaacgaatatccagtaatgaatcgttaaaacccgtacgataatattttttccagtattgcggttcgtcgagcatcacttcttcaattaccgccaggcaaccgctgcgattttcaggggcgataagttcctgctcaatttgtgccagtgcaaatatcgcctcgcgtaaagcaaaggttaatgcgggaccgactttcaatattgcaaagtgatcgcggactaattcccaataagccgtccgggtctggtaatcggtagaatgtgcttcataaaccattcgggtgttttctatccattgcgccagcggctgcgcttcctgcggctgataatggataatattgctgtgatcaaattccacgcccggctgcaccacgatggcaatcacgcgtgttaacgcctctgtcagcccacgggcaataaaggccttttgatgcgtacgtaaagtattggcggcatcttcaacatgggtgatgtgtactgactgaatggcgctggcctcaccgcccggaaccggaacttcagtgccaatgacatagctcagttgctcacgctggcaatctgtcgccacactttccgcagcaaagcaaagcagctcgttccgcaaccgtttctggtgctaacggtatgggatcccccgcgcaggacattgacgcatcaagatgaattttactgaagccagcacgaacatatgcttttaccagctcgacggatttttccatcgccgcatccgcattttcttgctgccagcagtttggccccagatgatcgccgccgagaataatgcgttcgcgtgcaaatccgactttatcggcaatcgtaaaaacaaattcgcgaaagtctgccggtgtcattccggtataaccgccaaattgattgacctggtttgacgttgcttcaatcagcactttgcgcgtgctgttgcgatcaaatgccagcgccgcttcgataaccaacggatgggcagaacagactgaacatatgccgatatgttcaccagctttatgccgggcaattaacgttttcatgttttttccttgttaaatggcaggtgcgttatgccctgccctcgcagccacaatcggcaatcactttgctcaccacatcgcgcattgcggatttagccgactgcaaataatcccggggatcggtcgcttcagggtgctcggtcaggtaattttttaacgcctgcgagaaggcatttttcagctccgttgcaacgttgattttgcatatccccagtttgatggtttgctgaatatccttagtcgataaccctgacgcgccatgcagcaccagcggtaagttcacccactggcgaatgttctccagtcgagaaaaatcaagcgccggtgcgctggcatacatcccatgagccgtgccgatggcgaccgccagggaatcaattccggttgcctcggcaaattcacgcgcctgagcggggttggtataaaaaacatcggcttcattgacttgcacatcatcttcctggccgccaagttgccccagctccgcttcgacgctgacatcaaagcgatggcaaaaatccaccacctctttgacccgtgaaatattttgcgcaaaaggcaaatgcgaggcgtcaatcatgactgagcgcacgccagaacgaaccttctgagcgatatcgtcaaatttcgtgtgatggtcgagatgaattgccagtggatggtgatattgcttcgccatcgcgctgaccagcgccaacagattttctgtaccagcataagtgaatgtgccaggcgttccggcgatgatgaccggcgcatgcaggttggcagcggtttccaccaccacttgcatcgtttcgagattgtgaatattgaatgccggaaccgcataaccgccgcgctgtgcgttgttcagcatctgctttgtcgataccacgtacattttcatatcctgtcgcttgttttcgatttcaaaatataatgaaatgatttgtttttaaatgtcgagataacgatcacaaaacgacaatatgaaaactgttcgaggagtgaaaggcaaaaaaacggcctcccgatagggaagccgtagcaaagtgcgcgtgtttttatgccggatgcggtgtaaacgccttttccgacatacgtggcagtgctatgtaggcatgataagacgcttccgcgtcgcatcaggcataggttgccggatgcagtgtaaacgccttatccgtcctacggggtggtgctgttcgtatgaggcgtatcaggcaatagtaattttgctatcgagataaacgtcctgcacggcgttaatcagtttcacgccgtcagccatcgatttcttgaacgctttacgtccaagaatcagccccattccgccagcgcgtttgttgataaccgcagtacgcactgcatcactgaggtcagtttcaccgcccgcagcaccgccggagtttatcaacccagcccggcccatatagcagttagctaactgataacgcaccagatcaatcgggttttcgctggtcaatttgctataaacacgatcgtcggtgtaaccgtaattaattgctttatagccgccgttattttccgccattttttgtttgacgatatctgcaccgatggttgccgccagatggtttgcctgaccggtcaggtcggcggaaacatggtaatcaacgccatctttcttaaaggcggagtttcgcaaataggcccacagcacggtcaccatgcccagctcgtgcgcgcgttcaaaggccgcagaaatttcttcaatctggcgacgtgactcttccgagccaaaatagatagtcgtaccaaccgccaccgcgcccatgttgaaggcctgctccacgctggcatacagcgtttgatcgtaggtattcgggtaacttagcgtctcgttgtgattaagtttgacgagaaatggaatgcgatgcgcatagcgccgcgataccgacgccaacacgccgtaagttgacgccacacagttacagcccgcttcgatcgccagttcaacaatgtttttcgggtcaaagtagagcgggttagcagcaaatgaagctccggcagagtgctcaacgccctggtcaaccggcagaatagaaagatatcctgtgccagccagacgcccggtgttgtacaacgtctgcatattacgtaacaccgctggcgggcgattattgtcaatcattacgcggtctacgtagtcatgtccggggagataaagctggtcagaaggaattgtcatacaacggtgctgtaaaaggttgtcggcgtctttgccaagcaactgcgcaatatctgtcattactatgctcccgtaaattccgattggatatcggctatggattgtcctggcccgccttttgcgggcaatcataatcctggtcgttacgggcgagtttttccatcttttggatgttttttcagcgttttctgttggctcgattcatcagaaaaaatgttagcgcggtcaagttttcaccgcaaaggtatttaaaaggtattgttaagtggtattgtcatcgcgtaccttacattacctgtcatgaaggaattaaaagatgaaaacaacagcaaagctgtcgttcatgatgtttgttgaatggtttatctggggcgcgtggtttgtgccattgtggttgtggttaagtaaaagcggttttagtgccggagaaattggctggtcgtatgcctgtaccgccattgcggcgatcctgtcgccaattctggttggctccatcactgaccgctttttctcggcgcaaaaagtgctggcggtattgatgttcgcaggcgcgctgctgatgtatttcgctgcgcaacagaccacttttgccgggttctttccgttactgctggcttactctctaacctatatgccgaccattgcgctgactaacagcatcgcttttgccaacgtgccggatgtggagcgtgatttcccgcgcattcgtgtgatgggcactatcggctggattgcctccggtctggcatgtggtttcttgccgcaaatactggggtatgccgatatctcaccgactaacatcccgctgctgattaccgccggaagttctgctctgctcggtgtgtttgcgtttttcctgcccgacacgccaccaaaaagcaccggcaaaatggatattaaagtcatgctcggcctggatgcgctgatcctgctgcgcgataaaaacttcctcgtctttttcttctgttcattcctgtttgcgatgccactggcgttctattacatctttgccaacggttatctgaccgaagttggcatgaaaaacgccaccggctggatgacgctcggccagttctctgaaatcttctttatgctggcattgccgtttttcactaaacgctttggtatcaaaaaggtattattgcttggtctggtcaccgctgcgatccgctatggcttctttatttacggtagtacggatgaatatttcacctacgcgttactgttcctcggtattttgcttcacggcgtaagttacgatttttactacgttaccgcttacatctatgtcgataaaaaagcccccgtgcatatgcgtaccgctgcgcaggggctgatcacgctctgctgccagggcttcggcagtttgctcggctatcgtcttggcggtgtgatgatggaaaagatgttcgcttatcaggaaccggtaaacggactgactttcaactggtccgggatgtggactttcggcgcggtgatgattgccattatcgccgtgctgttcatgatttttttccgcgaatccgacaacgaaattacggctatcaaggtcgatgatcgcgatattgcgttgacacaaggggaagttaaatgaaaacagaacgtattctcggtgctctttatgggcaggcgttaggggatgcgatggggatgccctccgagctttggccacgcagccgcgttaaagcacactttggctggattgaccgttttcttcctggaccaaaggagaataacgcggcctgttattttaaccgcgccgaattcaccgacgatacctcgatggcgctgtgtctggcggatgcgttactggaacgtgaaggcaagatcgatccggatctgattgggcgtaatattctcgactgggcgctgcgtttcgacgcctttaacaaaaacgtactaggtccgacctcgaagattgcgcttaacgccattcgcgacggtaaacccgttgctgaactggaaaacaacggcgtgaccaacggcgcagcgatgcgcgtctcgccattaggttgtttgcttccggcgcgtgatgttgattcctttattgatgatgtagcgctggcgtccagcccgacccataaatccgatctggcggttgcaggcgcggtagtcatcgcatgggcgatttctcgtgccattgacggagaaagctggtcagcgattgttgattccctgccttcaattgcgcgacatgcacagcaaaaacgcatcactacgttcagcgcctcactggcggcgcggctggagattgcgctgaaaattgtgcgcaatgccgacggcaccgaatccgccagcgaacagctttaccaggtcgttggcgcaggtaccagcactattgagtccgttccgtgcgccattgcgctggttgaactagcacaaaccgacccgaatcgctgcgccgtcctgtgcgctaaccttggcggcgacacagacaccatcggtgctatggcgacggcaatttgcggcgcgttgcatggcgttaacgctatcgatcctgcgttaaaggcggaactggatgcggtaaatcagcttgatttcaaccgctatgccacagcgctggcgaaatatcgtcaacaacgggaggcggtatgagcggcgctcaattacacacgctgctgcctgaattaaccacgcgtcagccggtgatggtcgtcggcgcggcggtcattgacgtgatcgccgacgcttatgccctcccctggcgtgggtgcgatatcgaactgaaacagcagagcgttaacgttggcggctgcgcactgaatattgccgtggcgttaaagcgcctcggcatcgaagcgggtaatgccttgccgctcggtcagggcgtgtgggcggagattattcgcaaccggatggcaaaagagggcttaatcagcctgatcgataacgccgaaggtgataacggctggtgtctggcgctggttgagccggatggcgaacgcacttttatgtcattcagcggtgtggaaaatcagtggaatcgccagtggctggcgcgattaaccgttgcgcctggcagcctgctctatttttccggttatcaactggcctcgccctgcggcgaattgttagtggaatggctggaagagctgcaagacgtgacgccgtttatcgattttggcccacgtattggcgatatcccggatgcattactggcgcggatcatggcctgtcgacctttagtgtcgctcaatcgtcaagaggctgagattgccgccgaacgttttgctttatccgcagagataacaacacttggcgagcaatggcaggagaaatttgccgcgccgttgatcgttcgtctcgataaagaaggcgcatggtatttcagcaacgacgcttctggctgcattccggcatttccaacgcaagttgtagacaccattggggcgggcgacagtcatgcaggtggcgtacttgccgggctggcctctggtctgccactggcggatgccgtattactgggcaatgcagtggcgtcgtgggttgtcgggcatcggggcggtgattgtgcgccaacgcgcgaggaactactcctcgcacacaaaaacgtatagatcgctgcgacagtggctaatgctgtactcaataggccgttgctgttggtcaagcgccacttgcttgatcaccagcaccggtattttgctatctaactgaatatgtgactgaaactcggcatccggcatccgggcgctaacgcgggaacgcgtacgttgtgggtaaatgtgctggctgcggaaatagtcataaagtgaaatcccgatggcatcaacatcatgaattaaatgcgccggaacccacgattcctcaatcgataccgcttcttcatcgacatagcgaatacgcttaagcaaaaagacatcacttcctgcttcgaccgccagctgctgcgcgacttcttcgggacatttcacgacacgcttgttaacccatagcgtatcgggctttttcccgcgcaacaccacctgctgagaaaaacctcgcgcttctttcaacgagtattcgaagatgttgttgatctgcgtgccgtaaccgcgcgaacgcgtcaccacgccctcttcttccagcgcctgcatcgccttgcgcaccgtaatgcgcgaaacgccggttaactgacttaaatcacgctcaccgggcaaaatattgccatgctccagcaccccgctgcgcacggcattttttaccgtttcggcaaacttaatataaagcggcgtgttatccgccgctaaaatacgttcgttcagttgggcaatcagctgggtatgcgcttgttccatttgtctttttcctgccagggagtctggtgggagtatatcactgcttcttatttaaggcgtttctttaatcccatcaacgaatccctgcaactcctccaccgtgccattaaacacattaaaatccaccggaccattgatgccatctacctgtccacggtcggaatgctgccagaagcgccaggccatgccgtcattgtccggacgacgttgatagtagtgagccacccaccacggatattcattgaaatagcccgccagattcgtgtgataaaaaacggctcctgagtaaataatcggctttttccccgtacttttttcgaccatttttagccactgacttaccctcttgcgtaattcttttgccgataattttcctcgctcttctacgtccagtaccgcagggaaatcgccttgtgagaaatctaccgtttgcagaaataatcgcacctgaaccggtgctgctaccgacggggagaaataatgatatgccccgcgcagcaagccattttcgcggcttagttgccagttacgcgaaaaataggggtccaccagcttttcgccttccgtcgccttaataaaggcaaattgtaagcgaataccgttatcgcgcatttttgccacacgctgccagtcgatccgctcctgccagcgcgaaacatctattccgtgaatggtgtaactggcaggaatacgaatagcgaaagatttaaccgggcgataaccgtagaagtggatgtagtctgtaatctgaactgctgtcgaatagaaaaaattcaccgtctgacgcggataaattgcaacgatggaaattagcccaagagcgcataatagagcggtgagtttttttcgactggtaattcttagctgcattggtttcatccctgaatgtcagtgccaaaggctgacaataaccaaagcagctatagtacggtgctcaccaccaggcgtggaagtggtgaaccggaccaataccgtgaccaacttccagcgtgtcggcctgggctaacgccgatgaaagccagctttttgcctcctgtacggtgtcagcccagtttgtatggcgcgggcgtagtgcagccaacgccgcagagagtgtacaaccagtaccgtgggtgtttttggtcataatgcgcggtgcggtaaaccgttgttcaccctcgcgggtaaacagccagtccgggctttgctcatcatccagatgaccacctttcattagcactgcgccacagcccatcgccaacagcgatcgcccttgttccagcatttcctgttcggtgcgcgcgtgtggcgcgtcgagcaaggcggctgcttcgggcaagtttggcgttattaatgaaacctgtggcaataatcgactgcgtagcgtggcaactgccgaaggtgaaagcagtgggtcgccgctttttgccagcataacggtgtcgagtaccacgttttggatctgataacgttgcaaccgttctgccaccgcttcaacaatatcggtttccgccaacataccgattttagtggtatcgattcgcacatcgctgaacaccgaatcgagctgggcggcgacaaaatcaggctcaatgcgatacaccgactgtacgccacgggtattttgcgccaccagtgcagtaataactgagcaaccataagcgccaagtgccgagaaggttttaagatcggcctgaatccccgcaccaccactcggatcagtaccggcaatcgtcagagcgttaattcgtttcatgcctgcacctcctgcgtcaattgccagagcgcatcaaggaaatgtggaacaaaactgcctagcccctcgcttctggcgactgcgcgctctccggcttgtttcatccagtgacaggcagatgcgacattttccagcgtatcgcctggtaacgcacagcaggcagcgacaaccgccgataatgcacagccagttcctaccactttggtcattaacggatcgccaccgtgaatgccaacggcgcgatggccatcggtaacataatccacctcgccagtgaccacgacgattgcgccagtttcccgtgccagtgtttgtgcagcgggtatcgcgttagctgcggcgtcagtggtatccactccccgtccaccattagcaatgccagctaatgccatgatttccgaagcattaccacgtatcgctgccggtttaaaagataaaagttcatgacaaaaatggcggcgataatcgagcgcaccaaccgctactggatcaagcgtccagggtgtttgagagctttttgcttgctcaacggcagcacgcatcgcctgagcgcgtggctgcgtcagtgtgccaacgttaatcaacaaggcactggcgatagccgcaaactgactggcctcttcggtttcgataaccatcgctggcgatgcaccgagcgccagcaaggtattagcggtaaaggtttgcaccacatcattggtcatgcagtgcacaagaggggaatgttggtgaaaaaggtgtaacgcgtgcgcagattgcgctgaacccagcaggtcgacttgcatagtttgctcctgccataacgtgaagaagcaatgacctggtggtccgtgacttccctacgctggcattatccagatcaggtgatacgggtatttctcagccttcacgcagaagggcaccccgagtcgtttggttgcgatgataaatcgcagaggaggatggtaatgtccagcgcacgcgttgtaaacgaggaaaaacggcagttttacaatcgcgttaataaattatttgatatatgaatccagcaccttcagaacgacatccagatcttcttcacgttttagctcatccccctggtgaacgatgtgttccgtcagatgacctttaatcacttcccgcatcagaccgtttaccgcgccacggatagcagcaatctgttgtaaaactgcagcgcattcatgcggctcgtcgagcattttcttgagcgccacgacctggccctgaatcttactggcacgcgctttcagtttctgtttatcacggattgtatgagacatggcaacacctggttaacaagaatatgaaaatatcatagcactattaatctactggggggtagtatcaggtactggggggagtagaatcagattgccgaattaatactaagaattattatcatgaccgaatttacaactcttcttcagcaaggaaacgcctggttcttcatccccagcgccatcttacttggtgcgcttcatggcctggaaccagggcactcaaaaacgatgatggcggcgtttatcatcgccatcaaaggcaccattaaacaagcggtgatgctcggactggcagcaactatttcgcataccgcagtggtctggttaattgcctttggcgggatggtgatcagcaagcgctttactgctcaatcagcagaaccgtggctccagctgatttccgcagtgatcattattggcaccgcgttctggatgttctggcgtacctggcgcggcgaacgcaactggctggagaatatgcacgagtatgattatgagcatcatcatcacgatcacgaagatcaccacgaccatggacatcatcaccatcacgaacatggcgagtatcaggatgcccatgcacgagcccatgccaatgacattaaacgacgctttgatggtagagaggtcaccaactggcaaattttgctatttggcttaaccggtggccttatcccctgcccggcagcaattaccgtgctgttgatatgcattcagttgaaagccctgacactgggcgcaacactggtcgtcagtttcagcattggcctggcgttaacgcttgtcaccgtaggcgttggcgcagcaatcagcgttcagcaggtcgcaaaacgctggagcggatttaacactctcgctaaacgcgccccctatttttccagtctgttgattggcttagtcggtgtgtatatgggcgtacatggcttcatgggcataatgcgataactcaatcctttaggcttgcatgttatcttcagcccaggatgattcttaaatcagctatttccgctgactctctgctcgctaaggatgcttttagggcatcctttcatttacactttttacgaaatcatgggatcactaacaaaatatcgcttgtcagttatattgtatggcaggaaagatatgcgactgatattacagatccccaaagtggagagtttatgaccattaaaaataagatgttgctgggtgtgcttttgctggttaccagtgccgcctgggccgcaccagccaccgcgggttcgaccaatacctcgggaatttctaagtatgagttaagtagtttcattgctgactttaagcatttcaaaccaggtgataccgtcccagagatgtaccgcaccgatgagtacaacattaagcagtggcagttacgtaacctgcccgcgcctgatgccgggacgcactggacctatatgggtggcgcgtacgtgttgatcagcgacaccgacggtaaaatcattaaagcctacgacggtgagattttttatcatcgctaaaaaaagccccctcatcatgagggggaaatgcagacaccttgttattttttattattagccacttgctcgtcttgcttgttattagtcgtatttcacgttgattaatgcggttgcctccagtgcgccagatttaactttgtttgtatcgtagacgtagtaactggcagttatcggaattgaaaccgttgtatctgtaagttttgactttgccgcaatttcttttaaatttgtgtatcctttgctgttatcagtgatatttaaaaatgtgactggagaaccattgctttcaagcataaatccgactccattattttctgcacctttcaggatcgtgttactgccggctaacaaatcagaacttgataaatacacctgcattttccgtgatgtttgattttgttgacctaataaatttttacaacgcagaataatatccccttgtttactatttattgttgctttgttacctgtggctggtaattgtgaaacgggaatactgtctaaagtaattaataaatcgtccggtttgcaggttgtggttatcgggttgtatgacaatgtcagattagcattttgtgccaatgcatttctgtagctatttacacatgcatcccatgacttgccacctaataaacacagtagaaattgtactgcggcactcccgcgtgtcgatgatgaagcactggataatgtcgcaacaccattaatcatcactgaaccgccgccccccgcagaaacattcacttttgcattactggccgcaggtgtcaccgtaactgaataaccactggtgaaactggtctgattatttgacaacgtgatgttgtttttattggtccattcaaaatgtaaatttaattttatggtatcgttataaagcccaacaataatatccgacgaactcataggggtgatagtatttgtactcacgcatgacgaatcattaaaattatgctcatatgtcgctatttgtgtttgagtaagtgcaaaatccccctgaacaaccaaattgtgctgaacagataactcactataacatgccgcatagctcacaggcataaccatcatcattaatataaatagcattatgcgaatttccatagaaccacctgactattactggcaaatataatttctactttcatcaatctctttaccgaaggtgattgtgcatgaaagtccttgttgcttatcaattgctacattaaccgatggcggtatttcattggtgcgaataaataactggcttccctggccgacaacgccaatattatgaccgtggatatcattgacttcataaccaaacgttaatggttgcccatccgctcttaacgcttttataaaccagggcttgcgctgatcggtatcaaaattaaccagtacaaccgcgccgcgataaggtgcggcaattttccggttgccacgtaattctgcttcgctatcgctttgcgacacatccagcatcaggtgattttcccgataaggtgtcattccgtcgtataccaccactccattacggtttgttgtgcgatatttttgcccattgacataagcatctttaattcctggcgcattcatcacagcaaacgtttcggaaagacggttcgccagattaacgccacccgaccaggcgacaatgccccctgaaacactggctccagcctgtcgataagtactcgactgactataactgccattcactgttgccaccggcgcgttccaggttaaattcgctccagctgtcgtttcatttccctgatgttgatgactcaggttgacaccataattgaactgatcccgactccctactgttcctgataatcccgtattatttgaggcaaacccctgatcatcaaacgtcgttgagttagacatatatatttgccgacgaggcgtcgaaacgtcatcaccccaatcaaagggaatcgatataaaaatattaaaacgtttctcttcatgatgattctcgtcataagcctggcttgccgcgagggtatagcttatccgtcgcaggttgttggaataactcaactgataatccttactactgccgctacgcccccagtaatctcgccataacgtacttaatgacacagacccccaaccttctggcaatgactggctcatattggcggaaaagctatttttgcgaccaaaatcattctggtaataatcggcaatgtcatagacatcgttttcatcacggcgataattatctttattgtttgcccaaacgtgatcgttaaatgtccggtaatcacgcgacgaataacgccaggccgccagaccaaaacgcgtcgacgtttggctcacaaatttgttgtaggcaatttgataactttgcccgtcaaacacatcgccgttgtcttgtttactatgcgacttcgtggcatcgacggaaatggcaccaatgcgtgtattccagccagtccccaaagtgaacgcgtaataattattcgcaaccatcgagccaccatacaacgtcaataagttattaaaaccatactgataacccgcctggacaaaatcactatgtttgctcgccccttcaatatggctacgacccgccgcaaaatcatatttcgacacgccgggttgcagcatatttggcaccgctgcataaggcaccagataggtggttaccgaaccgtccgcctctttcacgctgacatcaagatctgctccaccaccggccaactgcaaatctgtaatcgcaaacgggccaggaggaacctctttctgataaaccacaaaaccattctgttcaatagttaccagcgcgttactctgagcaatcccctgcacccgtggcgtaaaattttgtttcgagttaggcaacatctgcatatcacgaaacaaccgcacacctctgaagcgaacagaatcaaaaatatcgcttgatgtgtacatatcacccacgcgaagcgtgccgagaagttgggcaaatccacgttccagatacagggtattgcttttccacacccctggattgttatttgttttactgaaactggcatcagaatgcagttgccaccccagtaaatttaacccgctgttaaaacgtacatatgtactcttactattacccgacgctttatagtcactgtaatactgactcacataataagaggtataaaacgcattaataccccgctcccagttttccggtggaacatagccactttcggtaatgactccaacttattgatagtgttttatgttcagataatgcccgatgactttgtcatgcagctccaccgattttgagaacgacagcgacttccgtcccagccgtgccaggtgctgcctcagattcaggttatgccgctcaattcgctgcgtatatcgcttgctgattacgtgcagctttcccttcaggcgggattcatacagcggccagccatccgtcatccatatcaccacgtcaaagggtgacagcaggctcataagacgccccagcgtcgccatagtgcgttcaccgaatacgtgcgcaacaaccgtcttccggagactgtcatacgcgtaaaacagccagcgctggcgcgatttagccccgacatagccccactgttcgtccatttccgcgcagacgatgacgtcactgcccggctgtatgcgcgaggttaccgactgcggcctgagttttttaagtgacgtaaaatcgtgttgaggccaacgcccataatgcgtgcagttgcccggcatccaacgccattcatggccatatcaatgattttctggtgcgtaccgggttgagaagcggtgtaagtgaactgcagttgccatgttttacggcagtgagagcagagatagcgctgatgtccggcagtgcttttgccgttacgcaccaccccgtcagtagctgaacaggagggacagctgatagaaacagaagccactggagcacctcaaaaacaccatcatacactaaatcagtaagttggcagcatcaccgccactttccagttcttccacccaggcctgcgggacactgaaatcgagacgaaaaaccccgatatcccaggtatagctcccaccctgaacaagttgctcaaatgttaaacattgcttaccgctggcgaagttatcgctattaatgcctaaccgcttgataacttctcttgataaacatgtttcttgcgggttgtctttaacaataatctcatatttcccgcgccattgcttattgacataaatatcgatgtcatactgccccggtaagggttgattatcatcaagacgaatatttgcaacctgctggtctttcattccacctatcataaaatgggtatcaaaggtttcttcagctgcataagcttcaatgccgagcaataacgctacgattgctgatgcaagtggggtcattctcaacataggcagctcctgcaattaaattttgtcactaatatagttgccatggtcatcgataatggtcagatgccagttatttgcattattacttttgacattaacactctgactttctaagggggcaatcataatagtttcataattgactttgacattattagctttgacatccgaaatcgtcacccaattagctgagtcattttttatcaccaaaccattgccactgcgatttaccagcaattttttaaatgtcgctttatttaccggagcaatacccgctggtcggtaaaacaacttaattctgttttgcatcgcaaacttcagtgcattcttaccttcttgctctggactatttggtggaatatccagaacattcagataaaaaatgctttctttattagtgggcagtttattcggcataattttgatttttacttgctgcccggaatttgcccctatttttgccactggtggcgttaacatgaaaggaacctgaattttttctggtggtaatgacgtatcgccatcatcaatccacgcctgcagcagcgaagaacggtttccctggttcatcaactgcaccatcacttctttattttctgccgggtaaataatgcgcgtcccgtagataacaattccggcatgtgcaggaaggaccatagaaaaaatgagtaaagataataatcctttcattttaatgcctcttaaattaaaaggccgccatgggatagcggccatgtttattacctggagaaacttacaattttatttattaatcctgcgccacacgcataaccagagaagataacacatcacctgattgcactgagttatctgtcagtttcaggtattttgctttaaacggaatagcatattgaccttccgctgttttataactctcaatgttaaaaggtgcagaaacatccaggacatcgctgttatcacctaaatagagatagtaacccacggtatcgttgctactggctatcgccttatcgttaccggttattttatcgttggtaatcaacgagagttttacaccagcaacttctttcgggcagctaatttttaacatgctgctggttacaccgactgcatcatcataggtagaatatttagctttaccttcaaagacagtggttggtacagtcggcatattaatacttactgaatcaccacccgcttcgaatttacacggagattctgcaatattccccttaatagttaatgttccggtatcaacgtctgcagcaaatactccagcgctcataaaaaaagaagaaaagacagcggcagcaataattgaacgtttcataatatgttccttaataaaattttttttggttgttaagagtctgtatctcttggaaacaaatttctcacatcaaaaaagttaccgcaatgtaaacacattgttttatttatttgaaacaaattaaccattgcaatataaatacaacaaatatttaagagtattaactatttatcgcatctatcaattaatgtagatttatgtaaatggtattgttgatatcaataaaaaagccgaaatcatttatataaatgatttcggctttctaaatgcaattaaaatcaggttgccaaattaatcgtagcgatttaacacgattcgacgtttgctatcgctacctgcaacaaccacttctgtcgttacacctttgacgggcgaagaaaacagatgacgggtgtcaacattatacgttaactgaccacaatgcggttgaggttgaccattaaccatagccatactgcatgttgggggactgatcctgccattaatcgctaatgtggcagtctctgaagagaatgcgggagaagccaatccataggcaagaaaaataattcctgacagccaatacttattcattgaaggttatgcctggatagaatgagtgcataacaaactatagctgtacatccactacacagccacgaaggatgataatgaagcattgcctgtatgatcaatcgactttgtagagtttcggacgaaggtccgcagaatattcgcagtattaaataagtgttcattaatgcggcaaaaactaatacaccgcatcaatgtaacatctctgcggtgtatgaagaataaccagaatggttaataggcgttagaccgcgcggaaggaaatctcgcctggaatgacttcaccctgccagtagagctgagctgcaacgcggtcagccagctggcggtagatagcggtaaattcgctctccggacggctgataaccgttggcgtgcctttatcgagatcctcacgtaaggagatgtgtaacggcatctgccccagcagctgtgtgtggtatttttcagccagtttctctgcaccaccggtaccgaaaatcggttcatggtgaccacagttactgcaaatatgcacactcatgttctcgacaataccaagcaccggaacctcgactttctcgaacatcacaatgccttttttcgcatcgatcaaagcgatgtcctgcggggtggtgaccacgactgcaccagttactggaatgttttgcgccagcgtcaattgaatgtcaccggtgcctggcggcatatcaagcaccagatagtcgagatccggccacaaggtttcctgcaacatctgcattaacgccttgctcgccatcggtccacgccacaccatcgcattgtcgtcagtgaccagataaccaattgaattggttgccaggccatgagacataatcggtgccatatgggtaccgtccggcgaagttggacgctgattttctgcgcccagcatggtgggaattgatgggccgtagatatcggcgtccagaatgccgactttcgccccttccgccgccagtgccagcgccaggtttaccgccgtggaggatttacccacgccgcctttaccggaactgaccgcaatgatgttcttcacaccattaatacccggctgattcttcacgcgttttaaggtggcgatattgtgcgacagtttccagtcgatagctttcgccccggtgatacgcagcagttcggcgctacattgctcttttaactcttcaaacgcgctatgccagacgaatggcataaccagttccacatgcaacgtgtcgtccatccaggcgacatggtgcaacgcgttcagcgtggtgaggttatgcttcagggttgggtgctgaaaattggccagtgtcccggcgaccattgcgcgcaaggcttctggtgatttggcctgggattgttcgttcatcccgactccttttttgtatagataaaccatcagctgatagtttacctgaagaatatagagaagtacttacttaacattttcccatttggtactatctaaccccttttcactattaagaagtaatgcctactatgactcaagtcgcgaagaaaattctggtgacgtgcgcactgccgtacgctaacggctcaatccacctcggccatatgctggagcacatccaggctgatgtctgggtccgttaccagcgaatgcgcggccacgaggtcaacttcatctgcgccgacgatgcccacggtacaccgatcatgctgaaagctcagcagcttggtatcaccccggagcagatgattggcgaaatgagtcaggagcatcagactgatttcgcaggctttaacatcagctatgacaactatcactcgacgcacagcgaagagaaccgccagttgtcagaacttatctactctcgcctgaaagagaacggttttattaaaaaccgcaccatctctcagctgtacgatccggaaaaaggcatgttcctgccggaccgttttgtgaaaggcacctgcccgaaatgtaaatccccggatcaatacggcgataactgcgaagtctgcggcgcgacctacagcccgactgaattgatcgagccgaaatcggtggtttctggcgctacgccggtaatgcgtgattctgaacacttcttctttgatctgccctctttcagcgaaatgttgcaggcatggacccgcagcggtgcgttgcaggagcaggtggcaaataaaatgcaggagtggtttgaatccggcctgcaacagtgggatatctcccgcgacgcgccatactttggttttgaaattccgaacgcgccgggcaaatatttctacgtctggctggacgcaccgattggctacatgggttctttcaagaatctgtgcgacaagcgcagcgacagcgtaagcttcgatgaatactggaagaaagactccaccgccgagctgtaccacttcatcggtaaagatattgtttacttccacagcctgttctggcctgccatgctggaaggcagcaacttccgcaagccgaccaacctgtttgttcatggctatgtgacggtgaacggcgcaaagatgtccaagtctcgcggcacctttattaaagccagcacctggctgaatcattttgacgctgacagcctgcgttactactacactgcgaaactctcttcgcgcattgatgatatcgatctcaacctggaggatttcgttcagcgtgtgaatgccgatatcgtgaacaaagtggttaacctggcctctcgtaatgcgggctttatcaacaagcgttttgacggcgtgctggcaagcgaactggctgacccgcagttgtacaaaaccttcactgatgccgctgaagtgattggtgaagcgtgggaaagccgcgaatttggtaaagcagtgcgcgaaatcatggcgctggctgatctggctaaccgctatgtcgacgagcaggctccgtgggtggtggcaaaacaggaaggccgcgatgccgacctgcaggcaatttgctcaatgggcataaacctgttccgcgtgctgatgacttacctgaagccggtactgccgaaactgaccgagcgcgcagaagcattcctcaatacagaactgacctgggatggtatccagcaaccgctgctgggccacaaagtgaatccgttcaaagcgctgtataaccgcatcgatatgaagcaggttgaagcactggtggaagcgtctaaagaagaagtgaaagcagctgccgcgccagttactggcccactggcagatgatccgattcaggaaaccatcacctttgacgacttcgcaaaagttgacctgcgcgtggcgctgatcgaaaacgcagagtttgttgaaggttctgacaaactgctgcgcctgacactggatctcggcggtgaaaaacgcaatgtcttctccggtattcgttctgcctacccggatccgcaggcactgatcgggcgtcacaccattatggtggccaacctggcaccgcgtaaaatgcgctttggtatctccgaaggcatggtaatggctgctggtcctggcgggaaagatatcttcctgttaagcccggatgctggtgctaaaccaggccatcaggtgaaataatcccccttcaaggcgctgcatcgacagcgccttttctttataaattcctaaagttgttttcttgcgattttgtctctctctaacccgcataaatactggtagcatctgcattcaactggataaaattacagggatgcagaatgagacactttatctatcaggacgaaaaatcacataaattctgggcagttgagcaacagggaaacgagttgcatatcagttggggaaaagttggcaccaaagggcaaagccagataaaaagtttttcagatgctgcggcagcggcaaaagcggagcttaagctgattgcggagaaggtgaagaaggggtatgtggagcaagcgaaggataattctttgcaaccttcccaaacggtaacgggctctctcaaggtagcggacttatccaccattattcaggaacaaccctctttcgtagcagaaacccgtgcgcctgacaaaaatacagatgctgttttaccgtggctggcgaaagatattgctgtcgtttttccgcccgaagttgtacacaccacgttaagtcatcgccgctttcccggagttcctgttcagcaagcagacaaattgacccaattacgtcgcttagcctgtagtgtgtcgcaacgggataataaaacagccacatttgacttcagcgcctgttctttagaatggcaaaacaccgtcgcccaggcgatcagtcagatcgacggcctgaaaacaacacagttaccatcaccagtaatggctgtactcacggcacttgaaatgaaatgcacaagatataaagtgcgtgaggatgttatggatcagatcgtccaggaaggcggtctggaatatgctactgatgtaataatacaccttcaacagattgatattgaaggtaatgactccaacttattgatagtgttttatgttcagataatgcccgatgactttgtcatgcagctccaccgattttgagaacgacagcgacttccgtcccagccgtgccaggtgctgcctcagattcaggttatgccgctcaattcgctgcgtatatcgcttgctgattacgtgcagctttcccttcaggcgggattcatacagcggccagccatccgtcatccatatcaccacgtcaaagggtgacagcaggctcataagacgccccagcgtcgccatagtgcgttcaccgaatacgtgcgcaacaaccgtcttccggagactgtcatacgcgtaaaacagccagcgctggcgcgatttagccccgacatagccccactgttcgtccatttccgcgcagacgatgacgtcactgcccggctgtatgcgcgaggttaccgactgcggcctgagttttttaagtgacgtaaaatcgtgttgaggccaacgcccataatgcgtgcagttgcccggcatccaacgccattcatggccatatcaatgattttctggtgcgtaccgggttgagaagcggtgtaagtgaactgcagttgccatgttttacggcagtgagagcagagatagcgctgatgtccggcagtgcttttgccgttacgcaccaccccgtcagtagctgaacaggagggacagctgatagaaacagaagccactggagcacctcaaaaacaccatcatacactaaatcagtaagttggcagcatcaccgccagcggccacgatacgtattgattgaaggcccggctgattttaatgaccgggtagacgaactgtttttagcccaccagcttccggtagctatttacagttattgccagtatcaggacggtgcagcccccgggcgtggtgcctggacgccatttgctgaattttcgccggagtggcaggcgctacaagccgcacgtcgtattcaggcacaaacttacttcatcgatttgccttgctgggcgcagagtgaagaagtggacgattcgcctgatacgcaagaggaaagccaggccttgctgctgcgtgccacccgcatggataacagcgacaccctgtgggatcacttgttcgaagatgaaagccagcaaactgcattaccctctgcactggcgcactattttgcccaactgcggggcgattcccccggcgatgcactcaatcgtcagcgcgaagcctttatggcccgctggattggatgggcgatgcagcaaaacaatggcgacgtgttagtcgtctgcggtggctggcacgctcctgcactggcaaaaatgtgacgcgaatgcccgcaggacattaacacgccggaattgccctcgctggcagatgccgttacaggttgttatctcaccccctacagtgaaaagcgccttgatgtgctggcaggatacctttccggtatgcctgccccggtctggcaaagctggtactggcagtggggcttacagcaggcgggagaacaactgctaaaaacggttcttacccgtttgcgccagcacaaattgcctgcttcgaccgcggatatggctgccgctcatctgcatgcgatggcgctggcacagttgcgcggacataaactaccgttacgcactgactggctggatgccatagcaggctcgctgattaaagaagccctgaacgcgccgttgccgtggagctatcgcggagttattcatcccgacaccgatccgattctgctaacgttgatagacacattagcgggtgacggattcggtaaacttgccccttctacgccacaaccgcctctgccaaaagatgtcacctgcgaactggaacgtaccgcaatctctcttccggcggagcttaccttaaatcgctttaaccccaatgggctagcgcaaagtcaggtgttacatcggctggcaatactggagatcccagggattgtacgccagcagggaagcacactgacacttgcaggcaacggtgaagaacgctggaaattaacccgcccgcttagccagcatgcggcattgattgaggccgcctgctttggtgccacactccaggaagccgcacgccataaattagaagccgatatgctggacgcgggtggaatcggcagtatcaccacatgtcttagccaggcggcgttagcgggtctggcgtccttcagtcaacaattactggagcaactcacattattaatcgcccaggaaaatcaatttgccgaaatgggccaggcgctggaagtgctatatgccttatggcggctggatgaaattagcggtatgcaaggcgcgcagatattacaaacgacgttatgcgcggctatcgatcgcacgctgtggctgtgtgaatctaacggcagaccagatgaaaaggagtttcacgctcacctgcatagctggcaggcgctttgccatatcctgcgcgatctacatagcggcgttaatttacccggcgtttttctttctgcggcggtagccttactggagcgccgcagtcaggcgattcatgtcccggcgctggatcgcggcgcggctcttggcgcactgatgcgtctggaacatcccaacgccagtgccgaagcggcgctgacgatgctggcgcagttatccccggcacaatccggcgaggcgctgcacggtttgctggcgctcgcccgtcatcaactggcctgccaaccagcatttatcgccggtttcagtagtcatttaaatcaactgagtgacgacgattttattaacgccctgcccgatttgcgcgcggcgatggcctggctaccgccacgagaacgcgggacactggcgcatcaggtgcttgagcattaccagcttgcgcagcttcctgtttcagcgctgcaaatgccgttgcattgtcctccgcaagccattgcacatcatcaacaactcgaacagcaggcactggcatcgctgcaaaactggggagttttccatgtctgaactgaacgatcttctgaccacccgtgagctacaacgctggcgattaattcttggcgaagcggcagaaacgacgctttgtgggctggatgacaacgcccggcagatagaccacgcgctggaatggctgtatgggcgcgatcctgaacggctccagcgtggtgaacgctccggtggattaggtggctcaaatctcaccactcctgagtggatcaacagtattcacacgctgtttccgcaacaggtgattgagcggctggaaagcgatgccgtactgcgctacggcattgaagatgtggtgacgaatctcgacatgctggaacgtatgcagccttctgaaagcctgctacgcgccgttttgcacaccaaacatctgatgaatcccgaagtactggctgccgcccgccggatagtgcgccaggttgttgaagaaattatggctcgactggcaaaggaagttcgtcaggctttttctggtgtccgcgatcgccgtcgccgctcatttattccactggcgcgaaactttgatttcaaaagtactctgcgcgctaacctgcaacactggcacccgcaacacggcaagttgtatatcgaatccccccgctttaacagccgcattaaacgccaaagcgaacaatggcaactggtcttactggttgatcaaagcggatcgatggtggactcggtgatccactctgcggtgatggcggcctgtttgtggcagttacccggcattcgtacccatctggtggcgtttgacacaagcgtggttgatctcacggcagacgttgccgatccggtagagttattaatgaaagtacagttgggcggcgggaccaatatcgccagtgccgtggagtatggtcggcaacttattgaacaaccagcaaaaagcgtcattatcctcgtgagcgatttttacgaagggggttcatcatcattgctgacgcatcaggtgaaaaagtgtgtccagagcggcatcaaagtgctgggactggctgcgctcgatagcaccgcaacaccttgctatgaccgcgatacggcccaggcgctggttaatgtcggcgcacaaatagccgccatgacgccgggcgagctggcatcatggcttgcggagaatcttcagtcatgaattcactacgtccggaattattagaactgacaccgcaggccctgacggcgttaagcaatgccggttttgttaagcgcagtcttaaggaactggaaaatggcaacgtcccggagatcagccatgagaacgacgctttaatcgccaccttcagtgacggtgtccgtacccagctggcgaacggccaggcactgaaagaggctcagtgcagttgcggggccaacggtatgtgccgtcatcgcgtgatgctggtgttaagttatcaacgactttgtgccaccactcagtctacggaaaaagaagaagagtgggatccggcaatctggctggaagaactggctacccttcccgatgctacccgcaaacgcgcacaggcgctggtcgctaaaggcatcaccattgagttgttctgtgcgccgggtgaaattccctctgcccgcttaccgatgagcgatatgcgtttttattcccgcagcagtattcgtttcgcccgttgtgattgtattgaaagcacactttgcgaacatgtcgtactggcagtacaggcctttgtccaggcaaaagcgcagcaagcggaattgactcatttaatctggcagatgcgcagcgaacacgtcacatcatctgacgatccgtttgccagcgaagaaggcaaaacgtgtcgtcaatatgttcaacaactaagccaggcattatggctgagcggcatcagccagccgcttattcactacgaggccgctttcagccgcgcgcagcaagcagcggaacgctgcagctggcgatgggtgagtgaatcgctacggcaactgcgcgccagcgttgatgccttccacgcccgcgccagccactatcatgccggagaatgcttacgtcagcttgcggcattaaacagtcgattaaattgcgcacaagagatggcccggcgcgacagtattggtgaagttcctcctgtgccgtggcgcacggtcgttggctctggcattgccggagaagcaaagcttgatcatctgcggctggtgtctttaggtatgcgttgctggcaggatattgagcattatggtttacgcatctggtttaccgatcccgacaccggcagtattttgcacctttcgcgcagttggccgcgaagtgaacaggaaaactcaccggcagctacgcgtcggctgtttagttttcaggctggcgcactagcgggcgggcaaattgtttcacaagcagcaaaacgcagtgccgatggcgagctgctgttagctacccgcaaccgcttaagcagcgttgtgccgctgtcgcctgatgcctggcaaatgttgagcgcgccgttacgccagccgggcattgtggctttgcgggaatatttacgccagcgtccccccgcctgcatacggcctcttaatcaggtcgataacttatttattctgccggtcgctgagtgtatttcgctcggttgggatagcagccgccagacgctggatgcgcaggtaatcagcggcgaaggtgaagataatctcctgacgttatcccttccggcatctgcctgttctccttttgccgttgaacgcatggcggcgcttttgcaacaaacagacgaccccgtgagtctggtttctggctttgtcagctttgtagaggggcaattgacactggaaccacgggtgatgatgacaaaaacccgcgcctgggcgctggacgcagaaactgcgcctgtggcaccgctaccttctgccagcgttttgcctgtgccgtctaccgctcatcagttgctgatgcgctgccaggcgttacttattcaactgctccataacggctggcgctatcaggaacagagcgctattagtcaggcagagttgctggcgaatgacctctccgcggtcggtttttatcggctggcacatgtgttgggacaatttcgtaatacagaaagcgaggcacgggtagaagcaatgaataacggtgttttactttgcgaacaattattccccatgcttcagcaacaaggatgaaatagtgctttttactaagagttctactccagttccggactgctcacgccacggtattaggcatatcctatatagcccctggtgagagtcaccagttccttgattaaataaaatggagttttacatgaaggctttcaataagctgttttccctcgttgttgcatctgttctggttttctctcttgctggctgcggtgacaaagaagaatcgaagaaattcagcgccaatctgaacggcactgaaattgccattacctatgtctacaaaggtgacaaggtgcttaagcaatcttctgaaaccaaaattcaatttgcctccattggtgcaaccaccaaagaagatgctgccaagacacttgagccgttaagcgccaaatacaaaaacatcgcgggtgttgaagaaaaattaacctataccgatacctacgcgcaggaaaacgtgactatcgatatggaaaaagtggattttaaagccctgcagggtatttcaggaatcaacgtttctgctgaagatgccaaaaaaggtatcactatggcgcaaatggaactggtgatgaaagccgctggttttaaagaagtgaaataatctgtcggcggccatgtttcgcatggccgccatacccgtcttagcttttcttcacatgctggcgcgctgccagtccacgcagaaaataacgtaaaaattgatcgccgcattcgcggaagtttttatgatccggtgcgcgcatcatcgctgtaatttccggcatcgaaacgcggaactgctgttcggtgaggatcgccagaatgtcatcggttttcagcgaaaacgcgatgcgtaattttttcagcacgatgttgttattaatgcgacgttccggctccagtgccggagcagactcatccttgccgcgtttttcataaatcaggccattgaggaatgacgacaaaacaatgtccggacaacgctgaaaaccctcttcgtcttctttacgtagccagacggcgatctgttccgcggtggcttcgacattacccagcgccagaatacgcaccaggtcattattattggctttcaaaatgtagcgcacgctgcgcagaatatcgttacttagcatgaggccttcaggtgttgatgaggcaaaaagccattttagcagtcttttacaggccaatcgcctcttttaagcttttcagataacggcggctgaccggcacggttaagccattacgcaaaatcaactcggcctggccgttatcttccagacgaatctcctgtaaatgcgcgaggttaaccagatactgacgatggcagcgcagtagtggtgtacgactttccagggtacgtaatgtcaattcggtaaagccctctttcccttcgtggctggtaacgtagacaccgctcatccgactgctgacaaatgccacatctttcatttgcagcaaataaatccgactatgccccgtacaagggataaatttcagcgcctgttgattttccggtaacagcgaaacatcctgcttgctgcgctcctgacgcaatcgcgccagcgttttctccagtcgcgctttatcaattggcttcagcagataatcaaaggcatgttcttcaaaggctttaatagcgtattcgtcaaacgcagtgagaaaaacaatatacgggcgatgttccgggtcaagcatccccaccatttccagaccactgatgcgcggcatctggatatcgagaaacagcacatccgggcgcagtttatgcaccgcgccgatcccttccacggcgtttgaacactctccaacgatttcaatatcgctctgctcctgcaaaaatacacgcaggttctcccgtgctaacggttcatcatcgacaattaagactttaatcatgcctcgtccctccatggtagtcgtaacgttattcgggtgtaactatcaggctcacaggcgacgcttattccatagtcatcgccaaaccgttcacgtaaacgcttatccaccagattcatccccagcccactggcattggttaccggttgatacaaaccggcattgtcttcgatctccagcatcaaatgttgcccctcacgtcgggcgctgattgccactcgccctgtatccagcagttgtgatgtcccatgtttaatggcgttttccactatcggttgcagggtaaacgcgggcaattgctgctgggataattcttgcggaatagcaatgttgacctgcaaccgcgactggaagcgcgccttttcaatttgcagataagcgttcacatgttcaatttcgtcggcgagagtaacaaactccgaaggccgctttaagtttttgcggaaaaaagtggaaagatactgcaccagctggctggcctgttcgctgtcgcggcggatcaccgctttaatggtgttaagcgcattaaacaaaaaatgaggattcacctgggcgtgaagcagtttgatttctgactgggtgagcatcgctttttgccgctcatattgcccggcaagaatctgcgccgaaagcagttgcgcaatcccctcgcccagcgtgcggtttattgaactgaataaacggtttttggcttcatacaatttgatggtgcccatcacgcgctgattttcgccacgcaacggaattaccagcgtcgaccccagtttgcattgcggatgcaaagagcaacgataaggtacttcgttgccatcagcgtagaccacttcaccggtttcaatcgcttttaaggtgtaaggcgaagaaatcggtttgccaggtaaatggtggtcgtcaccaattccggtaaaggccagcaatttctctcgatcggtaatcgcgactgcaccaatatccagctcctgatacagcacctgagccactttcatgctgttcacttcgttaaacccctgtcgcaaaatgccttccgtcgaggctgccactttcagcgcagtggcagaaaaagccgaagtgtatttttcaaacatcgcgcgtttatcgagcaatatacgcataaacagcgccgcgccgacggtattggtgaccatcattggcgcagcaatattactcaccagacgcaccgcatcttcataaggtcgggcgatcgccaggatgatcagcatttgcaccatttcagcgacgaacgtgacggcaccggcggtaatggggttaaagactttatcagtgcgcccgcgacggatcaggatgctgtgtaccaggccgccgagcaatccttcaacgatggttgagatcatgcaacttagcgcggtcatgccccccatcgaatatcgatgtaagccgccggtcagaccaaccagcccaccgacgaccggaccgccgagtaagccgcccattaccgcgcctatcgcacgggtattggcaatagaatcgtcaatgtgcaacccaaaccaggtgcccatgatgcagaagatggaaaagacgatgtagcagagaaatttatgcggcagacgaaccgtgacctgcattaacggtatgaataatggcgttttactcattaaccacgcaatgactaaaaaaacgcacatctgctgaagcagcagcaacaccagattaaaatcgtacatacccgcaaaccacacttccctttaaaacgcgtaacatacattgcctgcgtttaactttctttgaactcttgcagaaaaatgagaattcgtgagtacgatcactcaaaatcgcctggcaaaaataaaatcaccctatagatgcacaaaaaacgggcaaaactacctggttcgcaaaactgcgtctaaagttaaaccgggacctcgcgagcaagggtgagacgatggcgctttacacaattggtgaagtggcgttgctttgtgatattaaccctgtcacgttacgcgcgtgacgcaacatttttaaaaatcgacgaagatcgtccaggagcgccgtttttcaagggttggatagatgattcgtttaccatgtcgacgaacttcgacgaatttcgccgataaaaagtgtcccatacatgccccattgatgccccataaacaatatcaggaattgacactggttatccatacagataaaaataacacctgtacataaccacagttacaggagggtgttatgcgtgttgagatctgtatcgctaaagaaaaaatcactaaaatgccaaacggtgctgtggatgcgttaaaggaagaattaacccgacgcatcagtaaacgttatgacgatgtagaggtgatcgtaaaagccaccagcaacgatggcctttctgttacacgcaccgcagataaggattctgcaaaaacatttgttcaggagactctgaaagatacctgggagtctgctgacgagtggtttgttcggtaatgactccaacttattgatagtgttttatgttcagataatgcccgatgactttgtcatgcagctccaccgattttgagaacgacagcgacttccgtcccagccgtgccaggtgctgcctcagattcaggttatgccgctcaattcgctgcgtatatcgcttgctgattacgtgcagctttcccttcaggcgggattcatacagcggccagccatccgtcatccatatcaccacgtcaaagggtgacagcaggctcataagacgccccagcgtcgccatagtgcgttcaccgaatacgtgcgcaacaaccgtcttccggagactgtcatacgcgtaaaacagccagcgctggcgcgatttagccccgacatagccccactgttcgtccatttccgcgcagacgatgacgtcactgcccggctgtatgcgcgaggttaccgactgcggcctgagttttttaagtgacgtaaaatcgtgttgaggccaacgcccataatgcgtgcagttgcccggcatccaacgccattcatggccatatcaatgattttctggtgcgtaccgggttgagaagcggtgtaagtgaactgcagttgccatgttttacggcagtgagagcagagatagcgctgatgtccggcagtgcttttgccgttacgcaccaccccgtcagtagctgaacaggagggacagctgatagaaacagaagccactggagcacctcaaaaacaccatcatacactaaatcagtaagttggcagcatcaccgtttgttcactaataaacacgtaaaatcggtaacggctggaaatcattcaatactcgcactatcgaaagtttaccagccaaccgcagcacgtcctgcatacgtcgtgtctgcggtttttctttttcgctgatatgactttccgtgtcaaaccggaatctctaattttgacgattttctttttaggtttaattccctgagggcgacgtagcagtaaatccgacggtgaatcacgctgatattcgcgggttggataccgcattacagaggtccgtcatatgagcctgccactttcttacgtcgcgaatcagctttgttccgccgtcgccaagcgctaacgtgcgttactcttgtaccgggctacgtcgccttcagggaactggttattctcattttttatttgtgacattgtggttgttgtgcgacagacattgctattcggcccatatcccagataaaacccgccagctcacgtgcaacagcaacaattgtaatattgacattctttcctttggcctgaagttttcgatacctcttacaaagcctgagttgagcatcccatgctctgtcaatgacggggcggggtaaattttcctgccttttttgtattgccggactgatgcgtgccggatgacggtaactccacgctgcctcgaccaatagctttctggcatagctgtttccggctttggtaatgctgccctgatgtctgcttccacccgatgaatattctgatggcgtgataccaaaccatgacatcagttgtcgtggatgttcaaaacgggtcagatcacccagttcagaaattaatccaaccgcagtaataaactgaatccctcgcatggcttgcagcgcctctactaccggatacagcctccattcggtaacggcctccttcagggcggattccagccgttcacattgtgcctgccgatcttctattgtacgacggtgttcgtcaaaagctaattgtcgccagggactttcgaatgagtatttgctgagccagcgtcggtgtgcagggccccaatctgctcgcccgacataatggaccccatgaaccagaagaaacgatttcagacgttgccttgcatgccgtaaatcatcgcgggcagatgcccatgcccgggccaaatcccggaatgcctcatcttcaatgccgggtacgtagacagcagaaagatctcctgcacgcagtgaacgcacaagtctgatggcatcacggcgatcggttttaacccgctcccccggttttttcgggataagtgagggggcgcagaccatgcagtcaaaaccggatttcaccagccgacgataaagtccataaccacagggccccgcttcataaacgatactgacctgcgatgactttgacctgagacgtttacaaagattctgaatatcagtaggtgatgtgccaattttacccatcagttcaacaggttctgaattgatagcataagcgacagtaatcgattctttgtgaacatctaacccgacgtacaatgtgttattgttgttcatgctggcctccgtggtggaaataccggggtgtagcaacagctcacccatgcggctctgacaacgatgttaacccgcgttaaatatcccacgttggccagcatctgtctcacggaaagtcatactgccttacattgtgtctggttcttccggccactcaatatcaggtgcagttgatgtatcaacacggttcagcaacacccgatacttcttccaggcttccagcaacgagttttcttcctccgttgcgatctccagatctacagcatcctgaagtggcgcaatatgctcactgaattcctggatgtagaactgtgtggtgacggtcttccagccattcggctcctgctgtatcgaagcataccaggctatttcaatatcgctatgctgcggcagcatttaaccccttgtaattcatcgccataattgatttaattcacaaataaaactataatatggtgaaattaatgaaaaaaaacacagatgatggggctaaaatttacacaccacttaccctaaagctttatgactggtgggttttgggagtatcaaatcggcttgcatggggatgtcctacaaaggaacaccttcttccacactttctggaacatttaggtaacaaccatctggatattggtgttggaactgggttttaccttactcacgtacctgagagtagtctgatatctttaatggatttgaacgaagctagcctgaacgcggcatctacaagggctggggaatcaaaaattaaacataaaattagccatgatgtttttgaaccttatcccgcggcgttacatggtcaatttgattccatttccatgttttaccttcttcactgcctgcctggaaatatatctacaaaaagctgtgtaatacgcaatgcggcgcaggccttaactgatgatggaactctatacggagccacaattcttggcgatggagttgtgcacaatagcttcggtcaaaaactgatgcgcatttacaatcagaaaggcatcttttcaaacacaaaagattccgaagaaggcttaacacatatactctcagagcatttcgagaatgttaaaaccaaggttcaaggtactgtagtaatgttttccgcttcagggaaaaaatagcatccaaccgcagcacgttcttgcttaagacgtgctacggtttcctttacgatttggggttgcgactttacctctattgataatgcattccggcagaacgttcaaatatgaacgtacgatatttaactaaccgaaaaacaaaatatagcacaggcgagacatttaccatctaagaaaatagtatcgtttttttacagttaaatcaacatctcttccttaaaatgaaaacaataaatttcaatcctgaaacattttatttcagcttattatttcccagtatcacattttatcagaatatccttctgcgaggttattatgcttcctgtaaataatccccccctatccactggaaacgtctctttttacagaactacatcaatcgacaatgttcacaataattatctctccgaatgggttgaatggactaaaaacagcatttccggagaaaacagggaaactgcttttacccggctccaattatgtctggagaacagtgaaacatcgttggacttatcttgtttaggtctcagatctctaccacgattgcctgacaatcttgatgaaattaatgtaagcaataaccaactatcaatgctccccgagctaccaagggcattgaaagagctgaatgcaagcagtaatcaattatctgcacttcctgaattaccagtgtcgctggaatatataaatgtgagtgataaccatttgttcgcacttcctgaattacctgcgtcactagaatatattaatgtaagtgacaatcacctgtctgtacttccgaggttaccaatgtcattggaattacttgatgcagccagaaatgctttggaagtaataccagattttccagaaagagatgatcatattataagaatattctggcttaatcagaaccggatcacggcaattccggaaagcatacttggcctcagttctgatagcgttgtcaatcttagagaaaatcaactatctcccagaataatgcaaactttgttacaacaaaccgcccaaccggactaccacggcccacggatttacttctccatgagtgacggacaacagaatacactccatcgccccctggctgatgccgtgacagcatggttcccggaaaacaaacaatctgatgtatcacagatatggcatgcttttgaacatgaagagcacgccaacaccttttccgcgttccttgaccgcctttccgataccgtctctgcacgcaatacctccggattccgtgaacaggtcgctgcatggctggaaaaactcagtgcctctgcggagcttcgacagcagtctttcgctgttgctgctgatgccactgagagctgtgaggaccgtgtcgcgctcacatggaacaatctccggaaaaccctcctggtccatcaggcatctgaaggccttttcgataatgataccggcgctctgctctccctgggcagggaaatgttccgcctcgaaattctggaggacattgcccgggataaagtcagaactctccattttgtggatgagatagaagtctacctggccttccagaccatgctcgcagagaaacttcagctctccactgccgtgaaggaaatgcgtttctatggcgtgtcgggagtgacagcaaatgacctccgcactgccgaagccatggtcagaagccgtgaagagaatgaatttacggactggttctccctctggggaccatggcatgctgtactgaagcgtacggaagctgaccgctgggcgctggcagaagagcagaaatatgagatgctggagaatgagtaccctcagagggtggctgaccggctgaaagcatcaggtctgagcggtgatgcggatgcggagagggaagccggtgcacaggtgatgcgtgagactgaacagcagatttaccgtcagctgactgacgaggtactggccctgcgattgtctgaaaacggctcacaactgcaccattcataatcacatcgcataaaccacagaccggactgactccggaaaaacagaggcccgcccccgggcctccccggattcatccgtttctctgttcagcctgaccgcacaccccggcggccggatgacagactccgcctcggtaagcaaagcggtcttctgtgattccgccagttgcggcttattcattacttaacgtcaaacgcccgaattgaagccaaatcatccagactgctcagctcctctttcatttcacgctgacggcgataaatctcgtcattgcgttcaacaacagcctgcaccattgctgccgccagttcttccagttccggcatcgacagtttcacctactgattatcggcatcaccccacgccatatgcgtttgtgctgtgacagattttgccagcatgactaccggggacaggcggcccagtgagttggggccagcattccagatacgaccgttccattcaaacgtgaacggcttcgcctcctgttctgtgcgccatgcttcaatttcctgacgtctggcctctctggccgcttccagcatttctggtgtcacagtgaatggggctatctcaccccatttgccactttgcagttcctgccagattcgctgacccgtcggtgcgacatcatcagcggtggctgtgtaggggactgcctggtccctgtcgtcaaaaaaaacgtcacagtctactgcgccactttcggtataacggggattaatgatttttttaatttccacggtgcattcctcacgatgtgcgaataaaaagcccgggcattgcgccagagacatgagcatccggcaccccggacagggcgctatatgaccccggtaatgaatgctctgaacatcccgtaatgaaaaattgtggggatgctatatacgttccggtgggagtactgggcactgaaatccccaccggtcccagtcgtgagcctctgtatgactgccccctgacaagtctgatgactttatcaccgtcagcttctccctggtacgcagcaataatcagcccgccaatgtcagggtctccccatctgttgcagacagagctcgccacgattctgtaaataatatcttctgtggttatatttattttcacccagccagtcagtctggatatgggccagtagcagtagcgggtgtgataaatggggccgttaatgccgtaaaaagtaagggatttggctctgtacctcggttctgttgtctcagggcgtgcatcagtccaccggatgctgagcaccccttcaaaccgtgtgtcgggtatgatgatgtcgtaggggccagcaacggaatattcacctggcagcgcattccttacccaggccaggaaatcactcttagtgtcaaaacggataacatcttcaggcagaaaagcacacccaaagccgaatgcgccgggtatcgccagacggccttttgtccggtcgtaaatgtcgctctgtgaggtagcctgagtttaacggacactccttcctgaaatagaatggcatcagaaggagctaataatgagcagaaaaacccaacgttactctaaagagttcaaagccgaagctgtcagaacggttcttgaaaatcaactttcgatcagtgaaggcgcttcccgattatctcttcctgaaggcactttaggacaatgggttaccgccgccagaaaagggctcggtactcctggttcccgcacggtggctgaactggaatctgaaattctgcaactgcgtaaggcgttaaatgaagctcgccttgagcgagatatattaaaaaaagcaacagcgtattttgcacaggagtcgctgaaaaatacgcgttaatcgaacaatggcgacaacaatttcccattgaagcgatgtgtcaggtatttggtgtatccaggagcggttattacaactgggtacagcatgaaccctcagacagaaaacaaagtgatgagcggctaaaactggagattaaggtggcacatatccgcactcgcgaaacatatggaacccggcggctccagacggagctggcagagaatggcatcatcgttggtcgtgaccgactggcacgtcttcgtaaggagctaaggctacgctgtaagcagaaacgcaagttcagagcgactacgaactcgaaccacaatctgccagttgcgccaaatctgctgaaccagacgttcgctcctacagcaccaaatcaggtctgggtggcggacctgacgtatgttgccacacaggagggatggttgtacctcgctggcatcaaagatgtttatacgtgcgaaattgtcggctacgccatgggagagcgcatgacaaaagagctgacaggtaaagccctgtttatggcgctcaggagccagcgcccacctgccgggctaatccaccactctgatcgaggttcacagtactgcgcatacgattaccgggtcatacaggagcagtctggtctgaaaacatcaatgtcgcgtaaaggtaactgttacgacaacgctccgatggaaagcttctggggaacgctgaaaaatgagagcctgagccactatcgttttaataaccgggatgaagccatctcagtaatacgggaatacattgagattttctacaatcgtcagcgtcgtcactctcgtctggggaatatctccccggcagccttcaggggaaaaatatcatcagatggctgcttaaaaaaagaacaaatggtagtgtccgctattgccagtacacctcagttgccaatgttaggtgaaaaaagactggtttcatctgtaacaaaagaggatttgcttttcgtaaggagagatctgttgaccggttatcaaaagctttctaacggaaaaatttcttccataaaaggacgctcagtggtcacagtaaactactatatgacaaccatagctggaatgtttcaatttgcaacagataatggttatacatcaggaaatccatttaacggtctgacaccattaaaaaagtccaagatagaaccagatcccctcacccgtgacgaatttattcgttttattgaggcttgccgtcatcaacaaacaaaaaacctgtggattatcgctgtatacacgggtattcgtcacggggagctggtatcactggcctgggaagatatagaccttaaagcgaggactataaccatccgccggaattatacaaaactaggcgaattcactccaccaaaaactgatgctggtaccggaagaacgattcatctagttcaaccagctattgatgctcttaaaagccaagcggaaatgaccatgcttggaaaacagcattctgtagaggtaaagcagagggaatatgggagaagtactgtgcataaatgcacttttgtttttagtcctcaggtaataaaacagcggcagttttccggaccgcactataaggttgactccatcagggagtcatggacaagtatcttaaaacgcgcaggtctgagacacagaaaatcgtaccaatccaggcatacttatgcatgctggtcacttgccgctggagctaatcctagttttatcgcaagccagatgggccacacaaacgcacaaatggtattcaatgtttacggagcatggatgaaagacaacaatcacgaacagatagaactccttaacaaaagactatctgaaagtgtcccatgtatgccccataagaaagtggggtaaaataaaaacttgtaaaatcagttagtttacccttaatccctgtcacgttacgcgcgtggcagaggcgttacgggttgctgaaaccgcaacggacagacggcggtcatcgactgttcaacgatgccgatattgaccggatccgcgagatcaaacgctggatcgacaacggcgtgcaggtcagcaaagttaaaatgctgctcagtaatgaaaatgttgatgtgcagaacggctggcgcgatcagcaagaaacattactgacctacctgcaaagcggcaatctgcatagcctgcgaacgtggatcaaagagcgcggtcaggattaccccgcccagacactcaccacacatctgtttattcctctgcgccgacggcttcagtgccaacaaccgactctccaggcgctgctggcgatcctcgacggcgtactgatcaactacatcgccatttgtctggcttcggcacgtaaaaaacagggtaaagatgcgctggtggttggctggaatattcaggataccacccgtctgtggctggagggctggattgccagtcaacaaggatggcgcattgatgtcctcgcccactcgctcaatcaactacgccctgaactattcgaaggccgtacattgctggtgtggtgcggtgaaaatcgaacctccgcccaacagcagcaactcaccagttggcaagaacaaggccatgatattttcccactcggcatttaatgattcgttaacaaatgcgctttactgtacaatcctttcgttaacataaggagtgcaatatgcgcatagctaaaattggggtcatcgccctgttcctgtttatggcgttaggcggaattggtggcgtcatgctcgcaggttatacctttattttgcgtgctggctaagcgcctgcaccagcctttcaaacaggcggtctgcgatgatcgccgccagtgccaccagtaacgccccctggatcacatacgcggtattaaatccgctaagcccgatgatgatgggcgtacccagcgtgctggcccctaccgttgaggcgatcgtcgccgtaccaatgttgataatcaccgaagttcgcacgcccgccagaatcaccggagccgccagcggtagctcgaccttacgcagtcgctgaccacgactcattcccatacctttcgcaacttctgtcacgctggcatcaatcgctcccagcccggcaagtgtcgcctgcaggacgggcagcacaccgtaaaggatcaaggcgataatcgctggttgcagaccaaagccgatcaccggaacggcaatcgccagcactgcgacaggcggaaaagtctgtccaacggcggcaatagtttccaccagtgggcgaaattccgcgccccacgggcgagtgacagcaattccggcaccagtgccaatgatcaccgcaaacaaactcgaaattcccaccagccagaaatgagccagtgccagagctgcaaaactttcttgctgataaacgggtcgtggcagttgtgggaacaaggcagcaaacagcggctggctgtaaggcagccagaaaatcagtgccacaaacaaagcaatgagccagaacagcggatcgcgcaacatcttcatacgcttacgcctcctccagcagatcctgaaaatgcagcgtgccgcaaggctggccctgcgtgttcaccaccggcagcacctcgcatccccgcgcgacaaacagggagagcgcatcgcgtagcgtcatctcttctgccagtgcctcaccttctgcccgttcttcgcgacgcacgtaatccgccacactacgtaacgaaagcaggcgcacacccagttcgctgcgcccaaaaaactggcggacaaaatcgtttgccggacgagtcagcatcgtcagcggattgccctgctgcaccacttcaccgtgatccatcaataccagatgttctgccagccgtagcgcctcatcaatatcatgagtgaccagcacaatggtacgccccagcaaacggtgaatgcgcgtcatctcttgttgcaacgcgccgcgcgttaccgggtccagtgcgccaaaaggttcatccatcagtaagacttgcggatcggcagccagtgcgcgcgccactcccacacgttgctgctgaccaccggaaagctgatgcggataacgctcacgtaaatttgactccagccccagtagcgccattaattcgtcgatacgatcgtcaatcctcgcccgcgaccatttttgtaattgcggcacggtagcgatgttttgcgccacgctccagtgggggaacaggccaatagattgaatggcatagcccatccggcggcgcaactccagtactggcagcgagcgaatttcttctccggcaaagcggatcactccgctgtcatgctccaccaggcggttaatcattttcagggtggtggatttgccggagccagatgtgccaatcagcaccgaaaaactcccttcctgaaaattgagattgagatcgttaacggctttttgtgcgccgaacagtttgctgacatggccaaattcaatcattacgtttcaccttcagcagtgcgataagcaaatcgaacagcgcgtcggtaagcaccgccagaacaattaccgggatcacccccagcaacactaaatcaatggcgctgcttagcagcccctggaaaaccagcgcaccaaaaccgcctgcgccgattaacgccgcaatcaccgccatacctacagtttgcaccatcaccacccgcaggctgcgcagaaataccggtaacgccagtggtaactgaacatgcaggaatcgctgcgccccgctcatgcccatcgctctggcgctctccagcacatcgcgcgggatctggttcaaaccgactaccacgccgcgcaccagcggcagcaaggcatagagcaccagcgcaatcagtgcgggtgtcattccggttcctgctatgccgagcgtccccagccacggaaaggccgtaaccagcgcggcaagcggcgcaatcaacaggccaaagagcgccaccgaaggcacggtctgaatgacattgagcagagaaaaaattgccccctgccgagcagtggaaaagtagcaccagatgcccaacggcacaccaatcactaacgcaggcagcaccgcaccaaacagcaacgtcagatgttgtgccagcgcgtcgtcaaacacatcctgacggttggcgtattctttcattagtgagagatcgttaagcgtgccggagtacagcaaccacagcggaataatggcaatctgcatatgcaacaaccagcgccacagcggatgcgtggagattcggcggatggcatcactacaggccagcaatgccagcgccgcggccagccagaaaccactgccgaggctggtacgcgccagcgcactgccattttgcgccagttgggtcgccgcctttcctgctccccacaccagcaatacgaagacgaattgcgccagaatgagtgcaaaaatgctgccttttttagcgggaataaaacaggctgtcagccaggcgcaaccaacgcccaccagcatccagatcgtttgcggccacagttgccagagatgacgcccttcacccgagactaaacgattaggcgcgtaactgataaacggcagcgccgctgcgattgccgtcagcaacagcagcagcgccagaacaggattaatacgtagataagtcacgggaaattacttcgtccaccctttttgtttcaggtagtcggcagccacttttttggcatccagtccttccactgcaatgctggcattcagttgctgcaatgtttttgcatcgaggctggcgaagactggctgtagccactgtgccatttgcggatactctttcagcaccgactcacgcaccactggtgcaggcgcgtagataggttgcacgcctttcggatcgcttaaggtttgcagccccagcgccgcgaccggaccgtcagtgccgtaagccattgcggcattaacgccagaagtttgctgggcagcggctttaatcgttaccgccgtgtcgccgccagccagtgacagtaactgatcctgatcgagtttaaagtcgtaggctttttcaaacgcgggtaacgcatcggcgcgttcgataaactctgccgaggctgccagtttgaaggtgccgccctctttcagataacgactcaggtcggcaagcgaagtgagtttgtttttctctgccacatcctgacgcacggcgatggtccaggtgttattcgctggtgcgggcgtcagccagattaacttgttttgctctgcatcgagttttttgactttctcgtaaccttgctgcgcgtttttccatgccgcatcgttttcatctttaaagaagaaagcgccattaccggtatattccggatagatatccagttcaccggaagtaatcgccccgcgcaccacaggagtcgttccgagttgcactttattcaccgtcggtacgccgtggctttccagcacctgcaagatgatgttgccgagtagcgcgccttcggtatcgatttttgaaccgactttaacgggggaagccgcctgtagcggcaggctcacggctgccaacataaccagtgaacctgcccagacctttgagagtggcatgatgctttcctcattcttttactgttgttttcagcgaattaagagaaaagcatagttgataatgacagagttagcctgagcggaaggattcagttgcagaatcagataaatacttaaagggcatattttgcccggcgtttcttgccggatgcggcgtaaacgccttatccggcctacaaaggtcgaaaattcagcaagttaagatatgaacatcaggcaaagggcgcaaacgtcgcgcccttactaaagcattacagcaactcaaactcgcctttcttaacgcgtgcggaatcagtgccgataaagacattgaacttgccaggttcggcgtcatatttcatctgttgattccagaacttcagcgcctcgatatcaatcgggaagctgacagtctgagtttcgcccggtttcagggtgattttctcaaagcctttcagctgcttcactggacggctcatggaagccgtcacatcctgcaagtacatctgtactaccgtggccccttcgcgtttaccggtgttcgtcacctgcacgctggcggtcactttgccgtcacgcttcatggtcggcgcagaaagtttcacatcagagacggtgaaagtggtatagctcagaccatagccgaacggataaagcgccccgttagcttcatcaaaataacgcgaagtgtatttgttcggcttgtcggcattatacggacgaccggtattcagatggctgtagtacaccgggatctgcccgacagaacgcgggaaggacattggcagcttgccggacgggttgtaatcgccaaacaatacatcggcaattgcattaccgccttcagtccccgcaaaccaggtttccagaatcgcatcagcctgctgatcttctttcaccagcgccagcggacgcccgttcatcagcaccagcaccagcggtttaccggtggctttcagcgccgcaatcaagtcacgttggctttgcggaatagtgatatcggtacggctggaggcctcgtgcgccatcccctgtgcttcaccgaccacagccaccaccacatcagattgtttcgccgtctgcaccgcttcatcaatcatctcttgcggcgagcgcggatcgactttgaccgcttcttcatactgattcaggaaatcgataatgcctttgtcactggtaacgttcgcccctttggcatacagcactttaccgttttcaccgacggcatttttaatcccggtcagtacggtcacggattgatcggcaacaccggctgcggaccagctgcccatcacgtcacgtttactgtccgccagtggcccaaccaccgcaatggtggccgattttttcagcggtaacgtttcgagacggtttttcagcaacaccaggctttcgcgcgccacttcacgcgcttctttacggtgcaggcggctttcggcattggtatccaccgggtcagactctttcggccccaaatggctgtatgggtcgttaaacaatcccatatcatatttaacgttcagtacatggcgggcagcatcgtccagctcttccatcgtcactttgccggatttgatcaacccaggcagatacttcgagtaatactcgtcgctcatactcatgttgattccggatttcagcgccacgcgcaccgcatcttccgggtctgccgccgtgccatgtttaatcagctctttgattgcaccgtgatcggaaacggtgatgcctttaaagccccactggtcgcgcagaacatctttcagcagccaggaatcggaggtggctggcgtgccgttcagcgagttcagcgccaccatcaccgcgccgctgcctgcgtccagccccgctttgtacggcggcatataatcattaaacaggcgctgcggactcatatcgacggtgttgtactctttaccgccttctaccgcgccgtatgcggcaaagtgtttgacgctggtcatcaccgagtagcgatctgccgggcttttaccctgcatcgcttccaccatggttttacccattgttgaggtgagatacgtatcttcgccaaaaccttcggaagcacgtccccagcgcggatcgcgcgagacatcgaccatcggtgcccaggtcatattcaggccatcatctgccgcttcataagcagagacacgtccgaccgttttcactgcatcgaggttaaaagacgaggccagaccgaggctaatcgggaacaccgtgcgctgaccgtgcagcacgtcgtaagcaaagaaaagaggaattttcaggcggcttaattccatcacctgatcctgcatggcgcggatatcctgacgggttacggtgttgaaaatcgccccaacctgaccgtctttgatcatctcgcggatcgcctctttcgggttatccggaccgacgctgattaagcgcagctgaccaattttctcatcaactgtcattttcttaagcagttcggtgacgaacgcatcccgcgcttcgggcgttaatggatggttgccgaataaatcatccgccagtgctggctgcagggccagactcaccgcgattcctactgaacatagccatttcatatggatttttcttcctctgttgcccgacgaggcagcgaaaatggtgcaaaaaccgtagtttgccataagcatgatggagagagaaaaagaatgctcagtttattgtctgaattttcaaaatattcactcgctgaattgtcatacaaggcgctattctagtttgtgatattttttcgccaccacaaggagtggaaaatgtcttccatgacaacaactgataataaagcctttttgaatgaacttgcccgtctggtcggtcattcacacctgctcaccgatcccgcaaaaacggcccgctatcgcaagggcttccgttctggtcagggcgacgcgctggctgtcgttttccctggctcactactggaattgtggcgggtgctgaaagcctgtgtcaccgccgacaaaattattctgatgcaggctgccaatacaggcctgaccgaaggatcgacgccaaacggtaacgactatgatcgcgatatcgtgatcatcagcaccctgcgtctcgacaagctgcacgttcttggcaagggcgaacaggtgctggcctatccgggcaccacgctctattcgctggaaaaagccctcaaaccgctgggacgcgaaccgcactcagtgattggatcatcgtgtataggcgcatcggtcatcggcggtatttgtaacaactccggcggctcgctggtgcaacgtggcccggcgtataccgaaatgtcgttattcgcgcgtataaatgaagacggcaaactgacgctggtgaaccatctggggattgatctgggcgaaacgccggagcagatccttagcaagctggatgatgatcgcatcaaagatgacgatgtgcgtcacgatggtcgtcacgcccacgattatgactatgtccaccgcgttcgtgatattgaagccgacacgcccgcacgttataacgccgatcctgatcggttatttgaatcttctggttgcgccgggaagctggcggtctttgctgtacgtctagataccttcgaagcggaaaaaaatcagcaggtgttttatatcggcaccaaccagccggaagtgctgaccgaaatccgccgtcatattctggctaacttcgaaaatctgccggttgccggggaatatatacaccgggatatctacgatattgcggaaaaatacggcaaagacaccttcctgatgattgataagttaggcaccgacaagatgccgttcttctttaatctcaagggacgcaccgatgcgatgctggagaaagtgaaattcttccgtccgcattttactgaccgtgcgatgcaaaaattcggtcacctgttccccagccatttaccgccgcgcatgaaaaactggcgcgataaatacgagcatcatctgctgttaaaaatggcgggcgatggcgtgggcgaagccaaatcgtggctggtggattatttcaaacaggccgaaggcgatttctttgtctgtacgccggaggaaggcagcaaagcgtttttacaccgtttcgccgctgcgggcgcagcaattcgttatcaggcggtgcattccgatgaagtcgaagacattctggcgttggatatcgctctgcggcgtaacgacaccgagtggtatgagcatttaccgccggagatcgacagccagctggtgcacaagctctattacggccattttatgtgctatgtcttccatcaggattacatagtgaaaaaaggcgtggatgtgcatgcgttgaaagaacagatgctggaactgctacagcagcgtggcgcgcaataccctgccgagcataacgtcggtcatttgtataaagcaccggagacgttgcagaagttttatcgcgagaacgatccgaccaacagtatgaatccggggatcggtaaaaccagtaagcggaaaaactggcaggaagtggagtaaaaattacggatggcatagtatcgccatccgtcattcacttaatcgttctgtgccgtctgccccgccgccgccatttgggcggctttttgttttttatagctcaacgctgctgctggaacaggcatcactttaccggtttcaatccaggtacgcaggcggctggcatcggcaaaatgggtatatttgccaaacgcatccatcactaccagcgccaccggtttattattgataaccgtacgcatcaccagacaatggcccgccgcattggtaaaaccggttttggttaactgaatattccagttatcgcgatacaccagatggttagtattgcggaacggcagcgtatacgtcgggttagagaaggttgccatatcttcccgggtagtacttaactgcccgatcaacggatattgtttgctggcaatgagcagtttggttaagtcacgggcagttgaaacgttatgcaccgacaatccggtaggttcaacaaagcgcgtgttgttcattccgagcgatttcgctttcgcattcattgccttaataaaggctttgtaaccaccgggataatggtgtgcaaggcttgccgccgcgcggttttctgaagacatcagcgccagcaacagcatatctttacggctgatttcgctattcagtcgtacgcgcgaatagacccctttcatctccggcgtctggctgatatccacttttagtttttcatccagcggcagtcgtgcatccagcacaaccatcgcggtcattaatttgctgatagacgcaatcggacgcaccagatccgggtggttcgagtagatcactttgttggtattcagatcaacaatcatcgcgctaccggaggcaatttcaggttgtgaagcggtggtagcggctgccgttttcgcaacggcctgcggtgccaaaggcacagccagcatcagggccaggctaaataaagaaactcgaaatttcggcatgatgagcattcagatagtggttcacgcgcacaggttgcgcaccgccggagtaaggatttactgaggctagcgacgccatcataacgagcaaaaagtgcgatcgtcaaaggagaatcgtgaggaaatgctgcattgctgacatttacgccagcaatgcaacgtcaaagaactttctagaacaaacgataaccgtagccccatagtataacggttagggcgagcagcacttccagtaccagcacgccaatcgccagcgtcgaactagagaagctaaggccttcctctttgttgatattcaggaagctcggaataccaaggtaaagcaggtagccggtgtaaaacagcgccaccgtgccgaccagcgcacacaaccagaccagtggataaagcgccaccagaccgcttaaaaacagcggagttgcaacgtagcccgcgaagaccatgcagtgcgcaagtgacggacgctgcggataattacgcgccatccaccagatgacccgccccattaccgcaaccccagccagcataacgccataaaacaggacagccagcgccagtccggtaaaccaggataacttcaggatagtgccatcgccaaaattccagccaatctgtgtagtgccaatgaaggcgcaaatcaccggaatcgccgccatcagcaaaacgtggtgggtgtaatggtgagaaatcgtttcgttttcgcgattaatcacctgcatttcacgatcgggatgggaaaacagtccccagacatggctcataccgcccccttgttgtgagttcatgaacctgacagttcaagtataagtcagcttgtgattattttttgttcgctcatgtaatttgcaccgtctgatgtacgtcctttttcagcgtgaatgatttccagggtgtatgcttacaggcaaccaaagggagacagactggcctatggatctcaatacactcatctcacaatatggttatgccgcgctggtgatcggtagcctggcggaaggtgaaaccgtgactttgctgggaggcgttgcggcacatcaggggctattaaagttcccgctggtggtactttctgtggcgcttggcggcatgattggcgaccaggtgctttatctgtgcgggcggcggtttggcggcaagctgttacgccgtttctcgaaacatcaggataaaattgagcgggcgcagaaacttatccaacgccatccgtatctgtttgtcattggtacgcgctttatgtatggctttcgggtgattggcccgacgctgattggtgccagccagctgccgccgaaaatctttctgccgctgaatattctcggcgcatttgcctgggcgttgatttttaccactattggttacgctggtggtcaggtgattgcgccgtggttgcacaatctcgaccagcatttgaagcactgggtctggttgattctggtcgtggttctggtggtgggcgtgcgctggtggctgaaacggcgcgggaagaaaaagccggatcatcaggcgtaaaaccattgccctgggtaaggcgttcgcgccgcatccgacatccggtgcaccatgcctgatgcgacgcttgtgcgtcttatcatgcctaccaaaattttacccattgaaataaccacgcacctcactgcgctattctgggttgaactgcggattcgccaacataaagccgccatccactatcaacgactgcccggtggtgtaatttgcgccctctgagcacagccacgctaccaggctggcaatctcatgcgttgcgccaaaacgccgcagaggaatcgaaggctccgcgtcgggcttcacgtcgctgtcatccatgccattcattggcgtggcgatcgccccaggcgcgactgcgttcaccaaaatcttatgcctgaccagctccagcgccatcgttttggttaacccgccgagcgcatgtttagcggctgtgtaagcgctggcatccggcagcggcgtatgttcatgtaccgacgtaatgttgatgatacgaccgccctgcccttgtttcaccatctggcgggccgcaatttgtgagcataaaaatgcaccatcgacatcaacggtaaaaatcttgcgccactcatcgaaagccatatcaagaaacggcgctttggtcattgcgcccgcattattcaccagcacatcaatacgccccagccgttgaatgagtttctccagcgcctgcgcaccttctggcagtttaccgagctccagctgcacgatctccgcacgtacgccgtggctaactacctcacgcgcggtatcttttgccccttcttcatctgagtgccaggtaatgccaatatcaaacccctgctgcgccagtaataacgcgcactctttgccgatccccgaatcggaggcggtaataatcgcaacctgtgccatcaagttctccacttaacgctgaataaacgttaagtatagaaggcgcatatcatcagcgtttgtaacccccgcccaacgcaccagtgagttgaatagaagcatccagccactgcccttgcaataacaggccattggcccgctcacgcagcgcggggattctggcttcgctgacgcgggaaccagcaatgatgcccgcgttaaagcgcgcctgcgcaagacctaccacacgcaaggcatcgcgctcaatttgcgcctgatgctggtttttctccgcaagtgtctgaacctgactggctgcccgcgccacgtcattcaccgcttcaaccaccgctttgttgtagctggcgatagacaagttgctttcggcttttgcgatattgagattggcgttaagacgaccactatcgaaaatgggtagcgtcaggcctgccgtaacgcccatttgctgcgcggaatgacggaacagatcgcttaagtgcaacgcatcctgttgcaggaaggccatcaggttgatgtcaggataaaatgccgcttttgccgcatcaatggtgcttagcgatgactcaacgtaccagtgcgccgcctgcaaatctgcccgccgggccagtaaggagtaccccagttcatcaggaagctggcttgccactttcggcaacgcgaccggtttaagcttcaatgactttgtctggttatttgtaagtgcgcttaaccgtgcctcaataattttcattttccccgcgacatcgttgagctgctgccgggttttgctggcattaatatcggtttccacaccttcaactgaagaagtaatcccgttctgatatagctggcgatcagtcgcgataatggtgttctgctctttttctatttgctgcaagaccgtgtttaacgccgcctgggtttgccactcccagtacaggcgggctacgctgccagccagcaattggcgggtttgctcgcgttccgccgcccgtgctttaaccgtacccaggcgggcagtaacctccgcccgattctttccccagatatcgagatgccagcccgccgttaagccaaaagtaccgttggtgtaccacgggccggtcgtacctgcggccggatcgttcagagcaaacggccccattaagccttctgccgacattttttgccgctccatatccgccgaaaagtcgatctgcggaccatcctgagtggcaactgccttcgcctgggcttcagctagctgaatgcgctgttcagccacctgcatatccggtgcgttctgtagtgcattgttaattaatgaagtgagctgattatcgtgatactccagccaccattggctgtctggccaaccatttttcagcgccgtgggtaatgcggtgtcaacttgtgcagcgggcgtttgctggcttaacgcctggcgggtttcatgcataggcgcacacccggccagcatcagtaacagcggaaaacaggcgatggctggataaaaggaatcacgattcatgggggaataatcaggtaagaaacggtgcgcggagattaccgtgtgttgcgatatattttttagtttcgcgtggcaatacatcagtagcaataaaacgacatacccagaaaaatatagactaagtaaatgatatcttccgatttatcttaatcgtttatggataacggcaaagggcttcgttttttcctatacttattcagcactcacaaataaaggaacgccaatgaaaattatactctgggctgtattgattattttcctgattgggctactggtggtgactggcgtatttaagatgatattttaaaattaattaatgtcatcaggtccgaaaataacgagaatatttcagtctctcatcctgttgcgctcctgtcatgtgcattgcttcatataatcactggcgcaaggagcgcgcagggggcggccaatcgccgccgccgcctgcacccccgggctctggcgaacaaaatcgccgctgcgcggtgccctcggcttatcccttacggctaccgggtcgggcgcgaggtaacatccctgtaaaacgcgccctcagcccacatccatgtgggctgccccggccttcagggaacgcctcggcaattttgacgccaccaaacaaccgtgcggcctattgataaagagctaacacattgtcaaaaaacatcactatggttttttagagtttctcgatatcaattgcctgaatagcccttgcaatatcaggggaattattcaacacccgaacatgctgaaataattccgttgcttcatcgtattctttacgcaaataactcaaccactgtttaatccgcgcaacgtgatataacccggtatcgccctgcttttccagacgggtatatttttgcagcaaagcaaccacctccggccacggcattcgcggttcgttatattttactacccggctcaggttgggaatattgagcgccccgcgaccaatcatcactgcgtcgcagccgctgatcgcaatgcattgttgcgcgctctgccagtcccagatttcgccgttggcaatcaccggaatattcagccgctggcgaatctcgccaatcgcctgccagtcaatatgctccgcgcggtaaccctgctcttttgtccgtccatgcaccaccagctccgtagcaccagcctgttgaaccgcatcggcgatttcaaatttcttctcaccgctgtcccagcccagacgcactttcacgctgacgggcaaatgcgccggtacagcttcacgcatcgcttttgcaccctggtagatgagttcaggatctttgagtaacgtcgccccgccgccgctgccgttaaccgctttcgacgggcagccgcaattgagatccacgccccaggaacctaattccaccgcacgggcggcgttctctgccagccattgtgggaactgacctaacaactgaacgcgcaccagcgtaccggatggtgtccggctggcgttttgtagctcagggcaaatgcgatgaaagacttttaccggcagcagttgatccaccacgcggacaaactcggtgatgcacagatcgtagtcgttaacttcggtcagcaattctcgcaccagagagtcaagcacaccctccatcggagccagtaacacacgcatatcttcacccggaaaaaaatgaggcgctatgttagcgcctatggtcaacggattaaaggtctgcaaagagggattgctgcaaactgtaatccctctctatgcttgatgtatgcctgagttcgttgcgcattgcgtaatgccggggagcgaaaaaataagcgctgatttcttaatgtgatcggtagcacgttttacgaattaattgtatgatgaatccatctcatctggggtgttgattatgagtaagacactgaacattatctggcaatatttacgcgctttcgtcctgatttatgcctgcctgtatgcaggcattttcattgcttccctgctaccggtaaccattccgggcagcatcatcgggatgctgatcctgtttgtcctgctggccttgcaaattcttccggcaaaatgggtcaatccggggtgctacgtactgattcgctatatggcgctattgtttgtgccgattggcgtaggcgtcatgcaatattttgatttgctccgcgcacagtttggcccggtagtggtttcctgtgcagtcagtacgctggtggtttttctggtggtgagctggagttcacaactggtacacggtgaacgtaaagtcgtaggtcagaaaggatcagaagaatgatggcgaatatctggtggtcattaccgctgacgttgattgtcttttttgccgcccgcaaactggcggcacggtataagtttcccctgcttaacccgttgctggtagcaatggtggtgatcattccttttttaatgctgaccggcatctcttacgacagctactttaaaggtagcgaagtgctaaacgatctgctgcaaccggcggtcgtcgcgctggcctatcctttatatgagcagctacaccagatccgcgcgcgctggaaatcgatcatcaccatctgttttatcggcagcgtggttgcgatggtgacggggacttccgtggcattgttgatgggcgcttcaccggaaatcgccgcgtcaatcctgccgaaatcagtcaccacgcctattgcaatggcggttggcggcagtattggcggtattccggcaatcagcgcagtttgcgtgattttcgtcggcatcctcggcgcggtatttggccatacattgcttaatgcgatgcgtattcgtaccaaagctgcgcgcggtctggcaatggggacagcctcgcacgccctcggtacggcgcgctgcgccgagctggattatcaggaaggtgcatttagttcgctggcgctggtgttatgcgggataattacttcgctgatcgcaccgttccttttcccgattattctggcagtaatgggctaaaatttgcgatgcgtcgcgcatttttgatgtaagtttcacgcgttgcataattaatgagattcagatcacatataaagccataacgggttcgtaaactgttatcccattacatgattatgaggcaacgccatgcatccacgttttcaaaccgcttttgcccaacttgcggataacttgcaatctgcactggaacctattctggcagacaagtacttccccgctttgttgaccggggagcaagtctcatcgctgaagagcgcaacggggctggacgaagacgcgctggcattcgcactacttccactggcggcggcctgtgcgcgtacgccattgtcgaattttaatgttggcgcaattgcgcgcggtgtgagcggaacctggtatttcggtgccaatatggaatttattggtgcaacaatgcagcaaaccgttcatgccgaacaaagcgcgatcagccacgcctggttgagtggtgaaaaagcgcttgcagccatcaccgttaactatacgccttgtggtcactgccgtcagtttatgaatgaactgaacagcggtctggatctgcgtattcatctgccgggccgcgaggcacacgcgctgcgtgactatctgccggatgcctttgggccgaaagatctggagattaaaacgctgctgatggacgaacaggatcacggctatgcgctgacgggtgatgcgctttctcaggcagcgattgcggcggcaaaccgttcgcacatgccttacagtaagtcgccaagcggtgtcgcgctggaatgtaaagacggtcgtattttcagcggcagctacgctgaaaacgccgcattcaacccgactctgccaccgttgcagggggcgttaattctgttgaatctcaagggttatgattacccggatatccagcgcgcggttctggcagaaaaagccgatgcgccgttgattcagtgggatgccacctccgcaacgctgaaagctctcggctgtcacagtatcgaccgcgtgcttctcgcttaagcctggtgccggatgcggcgtgaacgccttgtccggcttgccagccctctcctggtgtcgaaattcccggcaaacagtttgccgtttcttgcgcaaaaccagcgggtaaagtagcctgatggaaattttccttagatcgagtctcctgcatgttaaagcgcgtgttcctcagcctgttagtcctgatcggcttgctgctgttgactgtgctcggcctcgatcgctggatgagctggaaaaccgcgccttatatctacgacgaattgcaggatctcccctaccgccaggtcggcgtggtgctcggcacagcaaaatattatcgtactggcgtaattaatcagtattatcgctaccgcattcaaggagcgattaatgcctataacagcggtaaggtaaattatctattactgagcggcgataacgcattgcaaagttataatgagccgatgaccatgcgcaaagatttaatcgctgctggtgtcgacccatcagatattgttctcgattacgcaggctttcgtacgctggattccatcgtgcgtacacgcaaagtgttcgatactaatgatttcattattatcacccaacgtttccactgtgagcgggcattatttattgcgctgcatatggggattcaggctcagtgttatgccgtaccgtcaccgaaagatatgctgtcagtacgtattcgcgaatttgccgcccgtttcggtgcgctggctgacctttatatttttagacgtgaaccgcgttttttagggccgctggtccctattccggctatgcaccaggtgccggaagatgcgcaggggtatcccgccgtcacacccgaacagttacttgaattacaaaagaaacaaggaaagtagttatggatgtacagcagttttttgtcgttgccgtttttttccttatcccgatattttgtttccgcgaagcatggaaaggctggcgcgcaggcgcgattgataaacgggttaaaaatgcaccggaaccggtgtatgtctggcgagcaaaaaatcccggactctttttcgcttatatggtggcatatatcggcttcggaattttatctatcggcatgattgtttatcttattttctatcgttaatattttctcttttctgttaattattgagaataattattacttcactcaataagctgcggatataacattctgaaccgcagctatttgtgaatcctttcacagtttaaatttccccacacgcttagccttaatatcagcacgcaatatttatttagcgttcgccttaattactcatagcattaaggaagatcacatgccgcaacaaaattatctggatgaactcactccggcttttacgcctttactggcgattaaagaagcctctcgctgtttattatgtcatgacgctccctgtagtcaggcttgcccggcacagaccgatccggggaaatttattcgctcaatctactttcgtaattttaaaggcgctgccgagacaattcgcgaaaataatgccctcggtgccgtttgtgccagagtgtgcccgacggagaaattatgccaaagcggttgtacccgtgccggtgttgatgctcccattgatatcggccgcttacagcgttttgttactgattttgaacaacaaaccgggatggaaatttatcagcccggtactaaaacgctcggcaaagtcgcgattattggcgcaggtcctgccggattgcaggccagtgtgacactgacaaaccagggttatgacgtcacgatctatgagaaagaagcacaacccggtggctgattgcgtaacggcattccgcaattccggttaccgcaatcagtactggatgcagagatcgcccgtattgaaaaaatgggcgtgaccattaagtgcaacaacgaagtcggtaacacactcacccttgagcagctgaaagcagaaaaccgcgcggtactggtcaccgtggggttatcaagcggttccgggctaccgctgtttgagcatagtgacgttgagattgccgtcgacttcttgcaacgtgcacgacaggcgcaaggcgatatcagcattccacaaagcgcattaattatcggcggcggtgatgtcgcgatggacgtagccagcacgctgaaagttctcggctgtcaggcggtaacttgcgtagcgcgtgaagagttagatgagtttccggcaagcgaaaaagagtttaccagcgcccgggagctgggcgtttcgatcatcgatggattcacgccagtagccgtggaaggcaataaagtcacgtttaagcatgtacggttatcgggcgaactgacgatggcggcagataaaattattctcgccgtcggtcagcatgccagactagatgcctttgcggagttagagccgcagcgtaacaccatcaaaacacaaaattaccagacccgcgacccgcaagtctttgctgctggcgatattgttgagggagacaaaaccgtggtctatgccgtgaaaaccgggaaagaagccgccgaggcgattcatcactatttagagggagcttgctcatgttaacgaaagatctttcgattactttttgcggcgtgaagtttcccaacccgttctgcctctcttcttcgccggtaggcaactgctatgagatgtgtgccaaagcctacgacacaggttggggcggtgtggtgtttaaaacgatcggcttttttatcgccaacgaagtctcgccgcgttttgatcatctggtgaaagaagataccggttttatcggcttcaaaaatatggagcagattgccgagcatccgctggaggagaatctggccgccctgcgtcggctgaaagaagattacccggacaaagtattgatcgcttcgatcatgggggaaaatgagcagcaatgggaggagctggcgcgcctggtgcaagaagctggcgcggatatgatcgagtgtaacttctcctgtccgcaaatgacttctcatgcgatgggtagcgatgtcgggcaaagcccggagctggtagaaaaatattgtcgggcagtgaaacggggttccacgctgccaatgctggcgaagatgacgccgaatatcggtgatatgtgcgaagtggcgctggcggcgaagcgcggcggcgcagatggcattgcggcgattaacaccgttaaatccatcaccaatatcgatcttaatcagaaaatcggtatgccgatcgttaacggaaaatcaagtatttccggatattccggtaaagcggtaaaaccgatcgccctgcgcttcattcagcaaatgcgcacccatccagaactgcgcgatttcccaatcagcggtatcggcggcattgaaacctgggaggatgcggcggagtttttattgctcggcgcagcaacgttacaggtcaccaccggcattatgcagtacggctatcgcatcgtagaagatatggcgagcgggttatcgcattatctcgccgatcagggatttgattcgttgcaggagatggtaggtctggcgaataacaatattgtcccggcggaagatttagaccgcagttatattgtctatccccgtatcaatcttgacaaatgtgttggctgtggacgctgttatatttcctgttacgacggcggtcaccaggcgatggaatggagcgagaaaacccgcacaccgcattgtaataccgagaaatgtgtgggttgtctgctttgtggtcacgtctgcccggtgggttgtattgagctcggggaagtgaagtttaagaaaggcgagaaagaacacccggtaacgttgtagaacccgcgtcacatccggcatttggttcctgttgccggatgcggcgtgaacgccttatccggcctacaaaaccacacagatcatgatgttatgtgcgtttatgaccgaatgcggaccacattcacatcatttcttacgcgcgtatttcagtgaatccagcgctacggcgaagataataatcgcccctttgatgatgtactgccagtatgggtttacgccgatatacgtcaggccatagttgatgacggtaaaaataatcaccccggtcaccacgccaatcaccgtccccacaccgccgctgaacgatacaccgcctaccacgcacgccgcgatagcatccagctcatacataaagccgaggttgttggtggcagagccgatacgtccggcttctaacatcccgccaaaggcatagaacacgccagacaacgcgtagatcatcagcaggttcaggccgacgttgacaccagatacttttgccgcttccgggttaccgccaatggcaaaaatgttcttaccgaagcgggttttgttccacaacacccagacgaacgccaccgcaatcaacgcgtagaaggtgatgtaagagagacggaaactccccagcgcgacaaagccctgagcaaaggtagagaagccactgtcaaaaccagaaattggcgacgccccgacaaagtcgtaatagagcgagttgatgccatagacgatgatcatcgtgccgagcgtggtaatgaacggcgtcacgttgagataagcgataatcagaccgttgatcaaaccgatcaccgcaccaatggcacagacaatcagaataaccagcgcaatcggcatcgtcgccatttccgggaacactttgttggcgttatccatggactgcaataatgtcgcagccaccactgccgccagccctacctgacgaccagcagaaagatcggtcccctgggtgacaattaaccctgccacaccgagcgcgataataatacgcaccgatgactgggtgagaatattacttaagttcaacagacttaaaaatgttgggtcctggaaaataataatcgccagcaaaactaaaagaacgacgtaaataccgccctctttcaggtaagtaagaaaacttttcttatttaacgcactcatgggaagcccctaatcttaaaggtgcaaagacgcaagacgcagaatttcgttttgcgttgttgtttttgtatcgacaattccggaaacgagaccattgctcatgaccagaatacggtctgttatccctaacaactcaggcatttcagaggagataataataatccccttgcctttcttcgccagttcggcaattaactgataaatttcaaacttcgccccgacatcaataccgcgcgtcggttcatcgagcattaatatttctggttgcgttagtagccagcgaccaataatcaccttttgctgattaccaccggagagcgaaccaatttgcgtccgatgacccggcgtttttacccgcatcgaatcaatcacccactgggtatcgcttttcatccgcgagttatccagtaaaccaactttatttttgtagttgcgaatattggaaattaacgagttaaaaccaatatccagataggcataaattcccgttgagcggcgctcctcagttaccagtgcaaatccgtggtttatggcttcgttggcattatggttattgatctgtttgccgtgcaacgtaatggtgccagccgatttctcgcgaataccaaataacgtctcaacaatatcggtacgtttcgcccccaccagcccggcaataccgaggatctcccctttatgcagatcaaacgagacatcgcgaatcgacggctggcgcagtgacgttaggttacgcacctcgaggatgacttcgcccggcttgttttctttgtcaggaaaacgctgattaagagaacgcccaaccatcatggcgatgatcttgtccatcgtcagtcctgccagcggttcggtggcgatccactgaccgtcgcgcaatacggtaacttcatcacataactggaagatttcttccattttatgcgagatataaacaataccgcagccgcgctcttttaatttacgaataatagtgaacagatgattgacctctttttcggttaacgaagaagtcggttcatccataatcacaattttcgcgttataggaaaacgctttggcgatttcgatcatctgcatttgcgaaacggataatgtgccgacgcgcgcacgcggatcgatatcaatatccagttcatcaaaaatcgctttggtttcgcggtacattttgtcctgatcgacaaacatgcctttggtgggatatcgccccagccacatgttatccatcaccgaacgttgtaataccaggtttaactcctggtgtaccatcgaaataccattttccagtgcctctttggcggaatggaaatcgatctctttaccctggaataaaatggtgccggagtctttttgataaataccaaacaggcattttaataatgtcgattttcctgcaccgttttcccccattaatgcatggatagaatgtggccggaattttaaattaacgttatcaagtgccttaacaccaggaaaggacttgttgataccgctcatttccaacaagtattccccggaagacggagtcgttgagctgaccatataattttaccttgttggccatacaataagggcgcagtaaacgactgcgcccaatcagtcttatttcttgctgaattcagccaggttgtctttatctacgccaacataaggtacgcggaccactttgttgtcgattttccagttggtgccatcagccgcacctttgccatcggccaggtttttcgccagatcaaaggtcgctttcgcctggttgttagcatcgttcagtactgtgcccgccagtgcaccggatttcaccagcgccagcgcttctggcagcgcatcgacgccaaacaccggaatgctggacttgttgtgtgctttcagtgcttctaccgcgcccattgccatcgcatcgttgttggcgataaccacttcgattttgttggcgttcgggccagacagccaggcgtccatcttatctttcgcctgagcggtgtcccacattgcggtatctaactgtaactgttcagttttgatgcctttatcgttcaattctttaatcacgtaagtggtacgtgcttctgcatccggatggcccggttcacctttcagcagtacgaactgaatctgaccgtctttgttcagatcccaaccctgattcgccgcccagtgtttagcaatcaaatcgccctgaataatgccggactctttggagtcagtgccaacgtagtaggctttgtcgtagctatccagcgccttacgagacggttctttgttgaagaaaaccaccggcacgttttgcccacgcgctttctcaatcaccgtacccgcagctgccgggtcaaccaggttgattgccagtgccttcacccctttcgccagcaatacgtcgatctgatcgttctgcttggactggtcattctgagaatcattcatcagcagctgaacatctggcgcggctttcgcatcttgctcaatagccttgcgcactacagacataaagttatcgtcgtacttatagattgttacaccaatgcgagtatcagcagcgtgtgcagcggcaccgaataacatgctggccatcacagcagacagggttaacaccttcttattcatggtatctccggtttttcttatgcagggtagtgcttgagataaatgctcggcggggcagtagagttaatgaagtgttactgaacgccgaagctcacttttttaaattcgttcttccatgcccggtaacgctccagaaaacggctttaattgttgttatgacgctattacctcggtgaaagtgattattcactgttacatacgggttacaacgttaaaacggtgcaatcatagctatcacattgttaagatactgtgaaatcactcacagattgaaagcggttacatcgcctgatttgttgagttagtgatcgccgccgcattctggcgcgttgcgacagaatggcgacgcactaacgtcggcataaaacagtggctggcacgaggatcaatattgcctgctgccccctgcaaggccagttcggtggctaatttagccattgaagcaatgggataacgcacggtcgttaattgcgggtcggtgtaacgggcgatgggaatatcatcgaaaccgatgattgagagatgtaacggaatcgcaatgccattatcttttaatgctgtcagtgcgccagcggccatattgtcgttataagcaaatatagcggtaagttgtagattgcgccccagcagttcaaccatcgccgcctcaccgcccggcatgtccggcgtaccagtgccaatccagctttccggcggaataatatcctgctctttcaacgcactcatccagcctgctttacgcatggcgtcatcttcaatgccgtgactggaagaaagataaccaatacgttgatgaccgttattcagcaacatgcgcgtcgccattcgggcaccgctgagattatccaggcaaacgcaacgatgggcgtaccccggcacaacgcggttgattaacaccataccgggaatgttatccataaattgcgccagttcatcgtcactcaatgcttttgagtgaacaatcaacgcattacaacgctggcgaattaacacctcaatggcgtgacgctctttttccgcttcatgatagctattgccgattagcacgtatttctgatgctgctgagcgactagatccaccgcttttaccagcgcgccgaaaaacgcatcagaaacgtccatcaccaccacgccaatggtgtcgctaacctgagttgccagcgcctgggcattggcgtttggccgataatccagctcactcacggctttcattactgcttcacgcgtgtcggcactgaccagcgtgctgttattgagcacccgggaaaccgttgccacagagacgccagcctaacgcgctacatcacgaatggtgatcatattcactacctgttatgagattgcagtaaatgactgcttgctggcggctattttgtcagcactgaatacaggacttcgtgaatcgagtcacagcaatggaaacggttacagccgttttgttaacgaatgtgatccagatcgttatcttgatgttttagatattgccgttccggcagcacgcaaagttaactgacgccagagccattccaccggcccctggcggaagtaacgcagccagataacagagaagaggatattcgccagccataccggaataacaaacgccagcagctccaggcggtcaaaatgcataaacaaaccgaggtggtaaaaaagcatggtacaaatcagcgtttgcaatagatagttggtcagcgccatccgtccgacgcaggcgatcgcaagcaccagcttaaagcggctcaattgcggccagaagccataaaacagcgacgcatagccaatcgcctgaaacggcgcactcagttcccgcggcatttgaagtaagaaggcacaccagcgatacgcccagtccagctgccattgcagggcgatggcaggaaggttaatggtcaccccaatcgccaccagcacaaaaccagtacgacgatagtgacgtaagctgaactgccctttcagccagccgctgcgcatcagcgccgcaccaatgagcatcatccctgccagttgccagccatactgtgcgcccagtgccagtaaactgttgccaacaccatcggcacgattactgatcgcttcaacgccgccgtgaagcttccagtatttttcatacaaaatagccgatgcatccggcgtccaggtgcggctggtctggctgtcggaaatcagccccaataacagcaaaacgccaagccccaccagataaagcatgacgcctgtattaaacaggctttttaccgatggcgcatcgcgcaccagccgccagcagattaagcccaccagcccgtaagccagcagaatatcgccgtcccagaacaataaaccgtgaataaaacccagcaagactaacagcgttaaccgcgactggatccagcgtctgccacggggcagcaacatttgcaggcccgcaccaaacagcagcgcaaaaagcgtgaggaatttcacctggccgatgagatcgagaaatgcccaggtccatgcatcctgcggcgtaatagcgccgtaccaggcgggattgagataagccgcctttggtagcccaaaggcgctgatgtttaatagcaggatccccagaatggcgacgccgcgaacaaaatcgagcgttacgttgcgctccatggttcctgccttttaatcagttgtgatgacgcacagcgcgcagaaactcgtggcgcgtattctgactggatttgaacaatccaccaagagaggtcgttgttgtggcactggttgcatcgcggatgccacgcgctttcacgcagtaatgcaccgcatcaatggagacagccacgttattggtgcccagcagcgtttgtagcgcaataagaatttgctgcgtcagacgttcctgcacctgcggacgctgggcaaagaactgcacgatacggttaatttttgacagaccgatcaccgaatctttcgggatataagccaccgtcgctttgccatcgatggtaacaaaatggtgttcacaggtactggtcagagtgatatcgcgcacggtgaccatttcatcgaccttcattttgttttcaatgagggtgattttcgggaagttggcgtaatccagaccggagaaaatttcatcgacatacattttagcgatgcgatgcggcgtttccatcaaactgtcatcagccaggtcgagattcagcagctgcatgatttcggtcatatgaccagcaataaggcttttgcgcgtttcgttatccatttcatgcacgggcgggcgcagcggtgtttccagtcctcgcgcaactaacgcttcatgaaccagggccgcttctttactgagtgatggcatttatgatttctcctgcaggtgtgacgcctccgccctgcgtgggggcaaagttattaagctgatttacagcctgattattgtgcgtgaggcggcgcacataatccagtattcacagcgataattattgtaattgccgctgactttcatcagcagatgttaaaacatcgttatgcaaatacggaagtgaaagttactcacagcacattgaataaacggtatgatgaagaaattgcaaacaacacaacaaggagccacgcatggaaatgctcgaagagcaccgctgttttgaaggctggcagcaacgctggcgacacgactccagtaccttaaactgcccgatgacgttcagtatctttctcccaccccctcgtgatcacaccccgccaccagtgctgtactggctttccggattaacctgcaatgacgagaacttcaccaccaaggcgggtgcccagcgcgtggcggcagaactggggattgtactggtgatgccagacaccagcccgcgcggcgaaaaggttgccaacgacgatggctacgatttaggccagggcgcaggcttttatcttaatgccacgcaaccgccgtgggcgacgcattaccggatgtatgattatctgcgcgatgaattaccggcgctggttcagtcgcaatttaatgtcagcgaccgctgcgccattagcggtcactcaatgggtggtcacggtgcgctgattatggcgctgaaaaatccgggtaaatacaccagcgtttcggcctttgcgccaattgtgaatccgtgcagcgtcccgtggggaatcaaagcgtttagcacctatttaggtgaggacaaaaatgcatggctggaatgggatagttgcgcgctgatgtatgccagtaacgcgcaggatgcgatcccgacgcttatcgatcagggcgataatgatcagtttcttgccgaccagttgcaacctgcggtattggcagaagccgcgcgccagaaagcgtggccgatgacgctgcgtattcagccgggatatgatcacagttactacttcatcgcctcttttatagaggatcacctgcgcttccatgcgcagtatttactgaagtgaaagtccgcccggttcgccgggcatcttctcatcagaagcgataatccactgccataaagtaacgacgtccgtcttcgttatagctgtagtcgtcacgactgagatccttgtcgccaaggttcagcacgcctgcgcgcagtttgacgtctttagtcacctgccaggccgcgccggtattccagatggtataaccgcccggtgttttagccgtcgcgctgtcggcgcgtttctgcccggtatagtgaccagaaacatagaatgaccagtcttccagcgccagcggtttccagtccagcgtaccgttagcagtatggaacggcagatcggatagcggtttgttttcgccgttgctgacatcacgaccatcgttgtaggtgtagttgatcgacagtttccattcatcgttgaacggaattttcagttcggtttccacgccctgaatacgagctttgttaacgttgtagtagctaaataccggtatgcgccgtccgttagcgcccgtctcaaaaccaacaaagttttggtagcccggtgcagcgttgacgtcagacgtacggctgatgctgatacgatctttcacatcgttacggaaaacggtaacgctggattcaaccccttccagccagccttcttcacccatgtagtaaagccccagctcccaactttcgctggtttctggtttcagatccgggctacccacaatcttacatgcgccacggcaggaattgctcgtccagtcagggctaagttgcaacagagaaggtgctttaaatgccgtcgcccagccccctttcaccgttacggtgtcggtggcgttataaaccaggtaggcacgcggactccagtgttcaccgtaggtttcgtgatcgtccatacgcacgccggtcgtcagcgccagcggctcgaagatccgccattcatcttccacaaacagcgcgtactggctggcagacgttttggagctggttcccccggtcaggttcaccgcatcgctaagtttgtcgtgacgccattcaccgccaaccgtgagaaactgattaatcgccgtcagcggcaacgtgtatttgccgtcgaccgtattgctttcggaagttatcgggctgctgttgccagggtttttgttctcgactttctcaccgtagtatttcagttcgctggtgccgtaatcccaacgcccattatggctgacggagtagttctggcgttccaggcggtttttgtccagcgagtcggaatcacgatcctgacggtcgaaaccgtatccggcagtaaaatcgtgattttgattcggtgtccaggcaaattcgacattgccgtcgcggctggagaatccttcaatacgcggcgtttctccggtatcggtggtcgttgagttttgcgggtcatccttttcacgttttgccaggctgccgtaagctttcattcccagcacaccatcaattaatggtccactggtaaagaactgaccgttataggtatcaccgcgatcgcgatgttcctgaatggtggtatcgacggtaacggtacccgaccatttctgaccgatttttttggtgatgatattcactacaccgccgagcgcatcggaaccgtacagcgacgacatcgggccacggaccacttcaatacgttcgatggaatcgaccgggatccagttcagatcgaaatcattgtggcggaagacggcattgcgggagttcacgcgtttaccgtcgacgagaatcagggtatagctgctgtccagaccacgaatactaacgcccttacggttatccccttcgttcgtcagttgtacgccaggcacttctttgaggacatccttcagattctgtaccggttttcgctgcagatcttcctgggtaatgacgctgatactggcgggtgcatctttaaggttttgttcaacggaagatgcagtgacaaccatcgtttcgccatcgtcatcgaccgctaacacaggccatacacaagaaatagcggacaaacacagcccgacccgtacgaaagggttcaacctaaacattccatatctccatgaggtaactacgaaaataaaatgggtatcgctcacatcttctttacgtccccttgcgtacggcagcatcgcggtggacttatttgtatgcaggtgatcatcccagaaagccggaccagcctctgatttgtcagccttttttgattgtagcgtaacgataatgcaaacgataacagttatcaatccaaatgttaaattttatatccgcatgatttgtcagggaaatggaattgaaaaagccctctcggttgagagggcttagcaaggaagggaggaaacttatttcttatcgttctgcgggaacttcatttcgctgtagcgtacgaagtgagttcctttaatcagcttgtagccgaaccaaataatcaggaacagcgggataccaatatacgttgccgctacgccgccccagtcaatggtatctttcaggaacgcttcgtagttctggcccaaagtgataatcagacacagaatgaatgcgaagatcggccccagtgggaagaaacctgaacggtacggcagatcgttaatgtcgtgtccctgcaatacgtaaccgcgacggaagcgatagtggctaatggcaatccccagccaggcgataaaacccgtcatcccggaggtgttcagcagccacaggtataccgtctggttgccaaacatggaggtcaggaagcacaaaccggcaatcaccgtcgtcgcatacagcgcattacgcggcacgccaccacgcgacaatttagcgaaaatgcgcggcgctttaccgtcacacgccagggtgtacagcatacgagtagacgcatacataccggagttacctgctgacagcaccgccgtcagaataactgcgttcatcaccgccgccgcagagagcagacccgcgtgctggaacaccaaggtgaacggactgacgctgatgtctttaacatcgttacgcagcaggctcggatcggtatacggaataatcaggctgataatcaggatcgcgaacacatagaacaacaggattcgccagaatacctgacgtaccgcgcgtggaatgtttttcgccggatcttcggactcgcctgcagcaataccgatcagctcggttccctggaaagagaagccgacaatcatagctacgccgatcatcgccgcaaaaccaccagcaaacggcgcttcgccgattgtccagttgctccagcccgcaggctgcgcgcctttgaagataccgataatcatcagcacgccaacgatgataaagacaataactgtcgtgactttgatcagtgaaaaccagtattccgcttcaccaaagccacgaactgagatgtagttcagcaggaagataacgccgaggaacaacgcactccagatccagcccggtgtatccgggaaccaccagctcatgaccagctgtgctgcaaccaagtcaacggcaatagtcaccgcccagttgtaccagtagttccagcccagcgcgaagccaaagccttcttcaacatagttctgaccgtaagtggcaaacgaaccggaaaccggcatatatgcagccaattcaccgagactggtcatcaggaagtaaaccatcaggccaatcagcatatacgagagcaatgccccgcccggacctgcctgagaaatcgttgcgccagaggcaacaaaaagacctgtaccgatggaaccgccaatggcaatcatcgtcaggtgacgcgcctttaattcacggcgtaagcccggcgcttctgtagttttagtttcggaacccatacaaaaatgctatccatcttaaaaatgaggcgcgattgtagcagacgattggcaatccttccggcagaaatacacggttataagacaccttcatgatcgcccagggattataagtaaagcagccaatctcttttctggcgaatgcatgctgagggcgctgcgtcacgaaatcgacacagcaccagcatgttcttgtacagcaccttaacgcggtacattcgcgggatcgcaatagtccagaaagcgccgtagcgcgttggaaaggtgtttttgccgatgatgtatacgccacaacgtacgcatcaggcgcgggagagggaccgcaacttcacttaatgtgcctgcctgcaattgatcttcaatcacacgtcgcgacaggcaactaattcccaacccatgacgcaccgcatgtttgattgcctcggagttacctaattccatcgccatctcaaacttcggtaaatgtgacagcaacagataatcgacaatctcccgcgtgccggaaccgcgttcacgcaggatccacggcgcagcggccagctgttctaaggtgaccggaccacgagccaacggcgaagtcggcgcggcgaaaaccaccagctcgtcttccagccacggttcagaaatgatttcagtgctgtggcacggtccttcaataaagccaatatcaacgcggaaatccagcaccgcttgcatcacgtcctggctgttcccaacgctaagttcaatcggcaactgcggataatcatggcgataacgggcgataactgcaggcagaatgtagttaccgatggtactactggcatagatacgaatcgcgccgttgtcttcgcgaaacagttgttcgatttcaaccgcctgttcaagcaatgccaacgcacgcggatagagcagccgcccgtgttcattaacaaccagtcttttccccacgcgatcaaacagttgcacgccaagctgcccttccaggtcggtcaaggctgcgctcactgctgattgcgacaacgccagcatcaccgacgcctgggtggttgatccacttttcaatacttctgcaaaaacttccaactgccggagggtgatgtgcatagtcgcttaccacttataaagattaattataaatatataatcaattttatttttaaaccagttagtcgtaaccttatgcccggttaaaggagagggttatgacgaatatcaccttacagaaacaacatcgtacactgtggcattttattccggggttagccctgagtgcagttatcaccggggtcgccctgtggggtggttccattcccgcggttgcgggtgccgggtttagtgccctcaccctcgcaatcttgttggggatggttttaggcaacaccatctatccgcacatctggaaaagctgtgacggtggtgtgctgtttgccaagcaatatttattacgtctgggtatcattctttatggcttccgtctgacgttctcgcaaattgccgatgtcggtatcagtgggatcatcattgacgtgttgacgctgtccagtaccttcctgctggcttgcttcctggggcagaaagtgtttggtctggataagcacaccagctggttgatcggtgccggtagcagtatctgtggtgctgccgcggtactggcgactgagtcggtagtgaaagcggaagccagtaaagtaaccgtggctgttgcaaccgttgttatcttcgggaccgtcgcgattttcctctacccggcgatatatccgctgatgtctcaatggtttagtccggaaactttcggtatctacattggttctactgtgcacgaagtggcgcaggtggtggcggcaggtcatgccatcagcccggatgcggaaaacgcagcagttatttccaaaatgctgcgcgtgatgatgctggctccgttcctcatcctgctggcggcgcgtgttaaacagctgtctggggcgaacagcggcgagaaaagcaaaatcactattccgtggtttgccatcttgttcatcgtcgttgccatctttaactcgttccacctgttaccgcagagcgtggtgaacatgctggtaacgctggataccttcctgctggcaatggcgatggcggcgctgggtctgaccactcacgtcagcgcgctgaaaaaagctggggcgaaacctctgctgatggcactggtactgtttgcctggctgattgttggtggtggtgcgattaactatgtgattcaaagcgtcatcgcataaaccactacatcttgctcctgttaacccgctatcattaccgttttcctccagcgggtttaacaggagtcctcgcatgaaatacattggagcgcacgttagtgctgctggcggtctggcaaatgccgcaattcgcgccgccgaaatcgacgcaaccgcgtttgccttgttcaccaaaaaccaacgtcagtggcgtgccgcaccgctcacgacgcaaaccatcgatgaattcaaagccgcctgtgaaaaatatcactacacatcggcgcaaattcttccccacgacagttatctgattaacctcggacatccggtcactgaagctctggaaaaatcgcgcgatgcctttatagatgaaatgcagcgttgcgaacaactggggctttctttgctcaacttccaccctggcagccatctgatgcagatttcagaagaggattgccttgcgcgtattgccgaatccatcaacattgcgctggataaaactcaaggtgtaacagcggtgattgaaaacaccgccggtcagggcagtaacttagggtttaaattcgaacatctcgcggcgattatcgacggcgtggaagataaatcccgcgtcggcgtctgcattgatacctgccatgctttcgctgccgggtatgatttgcgtactccagccgaatgcgaaaaaacgttcgctgattttgcccgtattgtcggctttaagtatctgcgcgggatgcaccttaacgatgcgaaaagtacctttggcagccgcgttgaccgccatcatagcctcggtgaaggcaatatcggtcatgatgcgttccgctggatcatgcaagacgaccgtttcgacggcattccgctgatccttgaaaccatcaacccggatatctgggcagaagagatcgcctggctgaaagcgcaacaaactgaaaaagcggtggcctgatcgatgaacgacagggaaaagcagattcttaaaattttacggcgtaacccgctgattcaacagaatgaaatcgccgatattctgcaaatcagccgctcacgtgttgccgctcatattatggatttgatgcgcaagggtttgattaaaggcaaaggatatatccttaccgagcaggattactgtgtggttgtgggtgcaatcaatatggatattcgcggaatggcggatatccgttacccgcaagcagcctctcatccaggttctgttcactgttccgcaggcggcgtcggacgtaatatcgcgcataacctggctctgcttggtcgggatgtgcatttaatatcagctattggcaacgatttttacggcgagacattactggaagaaacgcgccgcgcgggcgtgaacgtttcaaactgcattcgtctgcatggacacagcactgcaacttatctcgctatcgctaataagcaggaagaaactatcctggcaatcaatgacacacatattctgcaacagctaacgcctcaactgctcaatacttcacgggacttgattcgccatgctggtgtggtgctggctgattgtaatctcacacctgaagccctggagtgggtctttaccattgctgatgaaattccgatgtttgtcgataccgtttccgaatttaaagcgaacaaagtaaaaaactggtacagccggatccacactctgaaaccaacacaaaatgaactggaaattttgtgggggcaaccgattaaagacgacaacgatcgcatcagagctgtaaattcgctgcatcaacaaggtgttaaacgcatttttgtttatctgaaagatgaatctgtattttgcagcgataaggatggagaacaatttttgctgaccgcgccagcgcatacgacagtagacagttttggtgctgacgatggttttatggcgggcctggtatatagctttcttgaaggatacagtttccgcgacagcgcccgttttgcggtagcctgcgcggcaatttcgcgcgccagcggcagcttaaacaaccctaccctgtctgccgataacgcgctttcattagtgccaatggtgtaacaatgttgccggattcgacgcttgaccgcatcttatccggctcataaattgcgcactacgctaaaccaataaagaatcctgcaatagtagcactcatcaggttagaaagtgtcgccgccgccagcgcgcgtaaaccaagttgggcgatttccggcgcacggtgtggcgcaaccgcagaaaacgcccccaccaccaccccgatagaaccaaagttagcgaaaccgcacaacgcgaaagaaataatcgccacggttttagcatccagagtgccacccgtttgcagatatggcgagaaattgagataagcgacaaattcattgatcgccagcttctgcccaatcaaactcccggcaagatttgcatcactccagtcaacccccatcacccacgccaatggggccaacaggtaacctaaaatcgactccagcgaagcatgttcaaaaccaaaccagccgccaacaccgccgataataccgttaatcaacgcaattattgcaacaaatgccataacaactgtcgctacaccggcggcgattttcagcccggtcattgcccctgtcgcagcggcttcaataatgctttttggcggtgtttcggtgaaagagaggttattaaaagaaacctgtgaagattccgtagccgggcttaacaggcgggcaaacaagatcccgccagggatcgccattaacgatgccgccagcaaatattccacaggtacgcccagtgcggcgtaaccaatcattgtcgaaccagcaatcgaggccatgccactacaaatcgctgtaaataattcattgcgattcagacgatcgataaagggtttgacgatcgccggaatttcgttttgcccgaggaaaatggtggtgaccgcgacgaatgactcgatcttgctgatatttaaagctttctggaagataccgccgagaatgcgaattaagatccccatcacaccgatgtagtagagaatactcaccagtgcagtgacgaagataattgccggtaataccctgaaaccaaagataaatcctgcgccatcaaataaggtatccattttcggtccgaccagagaaccgaagataaatgcgctacctgcgtcgctgtacgccatcactttgtggacgccaaaagcgactttttctgcgacccaacgccctggcggtaaccaaagcataatcccgccaatcacgacctgtaacactaacgccgcgccaacggtacgcaggctgatcttcttcttgtttactgacagtaaaaacgcaattgccagcagtaccaccattcccagaacacttctcatgacatccatagtgattatctcttcatgtcattttgggcgacggctttctgcccatcagaaatagccgggcctgcatcttgcgatactgtcccggcttgttatcaacacttaatgggtttttatgtagccgcgtacgcactcttcgactaatccccagaaccagtcggtatcaatagtgatgccgactttagtattggcgggcttgccaagaacgcccagctcgtcgcagacggtacgcccatagcaagggccactgttgacgtccacttcgacgtacatctcctgggttttaatgccatcagggttaatcagataaccgatgcaggtggcgtcgtgcaccgggccgccagccaggccgtagttttcgaactgcgttttgagagtgaagttcatgatgtcgctgaacatctctccggcagggccgcctgccctttccattcgtgcaattacgtccggggtgcaaacggtctggttggtaagatcgaggcccatcatcactaatggaacgccggaggtgaacaccacgcgtgcggcttccgggtcggcaaagatattgaactcggcagatggggtgaagttgcctgtaccgtaagcgccgcccattagcacaatttcacggattttgggcaggattgcgggttgcatacgcattgccaccgcgatatttgaaagcggaccaaccggcaccagagtgatatcgccatcgcttgccataagggtatcaatgatgtatttcaccgcgtgggtactttctgcctggcgggtcagcggctcgaataccgggccatccagtccggtttcaccgtgaatattatcggcaacgatttgttgacgcataatgggttgcggcatccccgcataaaccggaacattaatctccagtttctggcaaacattcaggccattaattaatgttttatcaagcgtctgattacccgcaacaatggtgatacctaataaatcaatcgccggatgtttcgccgccatcattatagcaatagcatcatcatgacccggatcacaatccagaataatttttctcttttccattgtttatttcctctgtttccagttgcgttattttttctacagcaacgaaatttcgatcgggccgatgattgaatcttaacaacagcgtacgaatgctaaatatgagaaatctcatagcggataaacatcgtgaaagaaatccacaataatgatcttaagcagcaattgatgagtgaatccgcgtttaaggattgctttttaacggatgtttcagccgatacgcggctgtttcattttttagcgcgtgactacattgtgcaggaagggcaacagccgtcctggctgttttacctgacgcgaggccgcgccaggctttacgccacgctagctaatggtcgcgtgtcgctgatcgatttctttgccgccccctgttttattggcgagattgagttaatcgacaaagaccatgaaccgcgtgcggtgcaggctattgaagagtgttggtgccttgcgctccctatgaaacattaccgcccgctgttattaaacgacacgctatttttacgaaaactctgcgtcaccttaagtcataaaaattatcgtaatattgtttctttaactcagaatcaatcatttccgttagtgaatcgcctggcagcatttatattactctcgcaggaaggtgatctttatcacgaaaagcatacgcaagcggcagagtatttaggcgtttcttatcgacatcttttatatgttctcgcgcaattcattcacgacggtttattaattaaaagcaagaaagggtatctaattaaaaacagaaagcagttgtcaggactggcgctggagatggacccggagaataaattctccgggatgatgcagtaaaaattattggcaatagcacgattgccggatgcaacgcttaataaggcgtacatccggcaatgaaactcaagctaaaccaataaagaacccggcaatggtcgcgctcatcaggttggaaagcgtcgccgccgccagcgcccgtaaaccaagctgggcgatttccggcgcgcgttttggcgaaatagccgaaaacgctccaacgacaacaccgatagaaccaaagtttgcaaacccacagagggcgaacgagataatggcaatggtcttgacatccagcgtgccgctcgtttgcagatagggcgagaaattgagataagcaacaaactcattaatcgccagtttctgcccaatcaaacttccggcaagatttgcatcactccagtccacccccataatccatgccaacggggccagcacatagccgaaaatgctttccagagagacattggcaaaaccaaaccagccgccaactccaccaataatgccgttgatcagcgcaatgatcgctacaaatgccattaccaccgtcgccacaccggcggcgattttcagcccggtcattgcaccgttcgccgcagcttcaataatgctttttggcggtgtttcgctaaacgacagattttcaaacgtaacttgcgaaggttccgtcgccggactaagaatacgtgcaaacaggataccgccaggaatagccatcagcgaagcggctaacaaatagtcaatcggcacgcccattccggcatagccaatcatcatcgaacccgcaatagacgccatgccgctacaaatagccgtaaatagctcgttgcgattcatgcgatcaataaaaggtttaacgatcgccgggatctcattttgcccgaggaaaatagtggtgactgcgacaaaagattcgattttgctgatgttgagggctttctgaaaaatactgccaagaatacgaatcagcagccccattacgccaatgtagtacagcaagctgataagcgcggtaacgaaaataatcgccgggagtacgcgaaaggcgaagataaagcccgcaccgtcaaacagaacatccattttgggaccgaccagcgaaccaaaaataaaggcacttcctgcgtcactgtaggacatcactttatggacgcctaatgccgcctgctctactgcccattttcccgggggaaaatagagcatgatgccaccaatggcaatttgcagcagcagcgcagcgccaaccgtgcgcaagctgatgctctttttatttaccgacaacacaaaggcaattgccagcaataccaccatccccgcaacacttctcattatatccataatgattttcccttcatgccagtaaacccggcgtcagcgccaggttttggtatgtttgatgagtacgggcgacggctttctgcccgccagaaattaacccacgagacgctgatattctttggcaatttcgctcgccagaatggcgttattaaagaccagttgaatattggatttcaggctatcaccgccggttagctccgcaacacgcgccagcaggaacggtgtactctctttcccaataacaccctgttcttcggcttcagcaacggcttgatcaattgctgcattgatggtttcttctggcatcgcaaactgttccgggatcgggttcgctaccaccaggccgccgttcaaaccggtttgccacttcactgccatcgcgcgagcaatttcgcgggcactgtcaagacgaatgctgacttcaaatgggctggttcggcagaaaaacgcaggcagcgcttttgtctgataaccaattaacggtacaccgaaggtttctaaatattctgttgttaatcctaaatcgagaatagattttgcccccgcacaaacaacagtgacattggtatttgccagttcctgtaaatcggcagaaatatcgaaggtatgttccgctccgcgatgcacaccaccaatacctccggttgcaaaaactttaatcccagccagtgctgcaataatcatggttgatgcaacggtagtcgcgccatttttccctgcagcaacgacaaaaggtaaatcacgacgactaactttcgtcacgttatgtccttcacggcccagcaattcgatttcttctttacttaagcccactttcatcacaccgccaataatggcgatagtggctggtactgcgccctgtttacgaattgtttcttctacttcaattgcggtttgggcattttgtgggaatggcattccgtgagaaattatggtcgattccagcgcaacaaccggttttttattttttaaagcatcctgtacttcagcggatatttgtaataattcaggggacagagttaattcagacattctgtgttctccactaacgatctaacattggcaattgataattcagggttgttggtatattcacaggcaagtgccattgacgaacatccctgcgcaaatcgaacagaatcgataaacggcataccgtctacccaacaggaggccagccccgccatcatggcgtcgcctgccccagtaacattgatgacattcgttttaataggggccgaccacccactttcaccgttgatatcactgtagtaaacgccatcccctcccatgctcagcaccaagcggttcaggccgtgttgatgaaaccaggcggcgacctttgcgacatcttcacgtccggaaagtgcaattccgctcaacgtttcggcttcaagacggttaggttttaacgtatggattttgctcagatgatcgcggattttgacgcatttccatgccgataccggatcaataaatacaggcgtttccccgctattttccagaacccagaccagcgcctcttcactaaggttgcaatccgcgacaataacctttgcaccgcgaataaactcctgatgctgggcaagaaattctgcagaaatacagtcactaatactcatatcatttatcgcgacaagcatttctcctgtattatcgagcagtgataaatagctggatgtattctcacccggaacaattaagcatttatcgacataaacaccggattgattagtttgcgccagtaatgattgcccataaaaatcaccacctactgcacttaaaagccaggcatttttccccagtaacgccagattatgagcgatattccttcccacgccacctggggtaaatttaatttttccgggattcgaatccgcataattcaatggatgatgtgaatacccagccacatcaatattcgccgaaccaataattactatgtagtccttttcgcgcatagcacgccccctggcaataaattgccaacgaagaaattgggtaaaatagccattacagtcaataagactattagagcacgtgttcagatttaaacacatgttcataataagcatatttaacgtaatgtaaatcgatcagaaaaaacgaaatcggccagatatgaaggcggtcacaaagtttgtctatttatgcagcaacaaaagagaaagttgtgatgtgtaacacacaatatggcaggcaagaaaaagggcagagatgtttctgccctccagattgttgacaacgcgcgctttgttcatcctggatgtggcgtaaacgccttatccgacctacaaaagcgcaaaaaattcaatatattgcagggttcatgtaggtctgataagcatagcgcatcaggcaattttgcgtttgtcatcatcggggcagagatgtctcatccccgataatgaagataaattatgcgtttttttctactatttgtgtttccgggcgtttcaggaaggcataggccaaacccgccaccagcgtaccggcaataattgctaccaggtaacccaataccggcgtaatagcgccagggatcagcagaacaaacagaccaccgtgtggtgccatcagtttcgcaccaatcgccattgagattgcgccagtcagcgccccaccaacgatacagcacggtagcacacgcatcggatcacgagcagcaaacggaattgcaccttccgaaataaagcacagaccaagtaccagagcggctttgccaccttcctgctgcgctttgtcgaatttgcgacgcgccaccattgttgccagacccattgccagcggtggcaccatacctgccgccataatcgccgccatcgggccataggtttgagtactcagcagacccacaccgaatgcgtacgctgctttgtttaccggaccgcccatgtcagtacacatcatgccaccgaggatcgcccccagcagaaccgcattcgcagtccccatggtctgcagccagtgagtcaacccatcgagaatgccagcaaccggtttaccgattaggtagatcatcgccagaccgaccaccagactggaaattagcggaatgatcaggatcggtttcagcgcctccatactctgtggcagtttcaattgcgtactgattaacttcgcaatgtaaccagccaggaagccagcaattataccgccaataaagccagaaccggtgctgaccgccagcataccgccaatcagacccggtgtgaggcccggacgatcggcaatggagaaggcaatataacctgccagtaccggcaccatcagcgcaaaggctgaaccaccaccaatctgcatcagcgccgctgccaacgtacccggctctttaaacgcttcgataccaaaagcaaaagaaagcgcgatacacagaccacctgcaacaaccatcggcagcatgtaagagacgcccgtcagcaagtgacggtaagcgcctgcactctctttcttaccttcagtggtcgctgtttgagctttgcccgctggttcatacggcgttgcttcagcaaccgctttatccagttcctgcgcagttttcttcagcgccagaccggtagaggtgcgatacatcggtttaccagcaaatttcgccagatccacttcgatatctgccgccacaatcaccagatccgctgctgcgacttcttcaggggtgattgcattgcccgcgccaacagaaccacgggtttcaactttcacccaccagccacgttttttcgcttcggtttcaatggcttcagccgccataaaggtgtgtgctacgccagtcgggcaagcagtcaccgcaactacgcgtttcggaccgctggcagcaaccggtgctgtcgcagcgaccggcgcagtgtaaggtttcgcatggcctttggcttcactcaggaacagctcagggtgcgcaactgcccgggaaatatcacccagccagacatttttaccgttcagcgcgctgtcattcgggatggaatcaccgagaacaatcgccatttctgcgtcgttcggattgtcgatgatttccagttttgcttttcgcgccgccgcgcccagcagggtcttcgccatataggcgcgtgcctgaccgagattagcgtcaataatcagcagcgttttcattatgcctctcctgctgtcagttaaaaggttgtaagtcgacgcgcgccatcattgcggccaactgcggacgatcggtaatacccacattgctttgacttaccgccagggctgcaacagctgtcgccagacgcagtgtgtgttcactggattcacgcatcagcaagccataaatcaggccaccaaccatagaatcccctgcgccaacggtgcttacgacatcgactgacggtggtttggcgatccattcgccggaggcattaacccaaagcgcgccttcggcacccagtgaaataacaacatgcgcaataccttgttcacgtagcgcatgtgcagcttcaatcacatctttcatttcaggcagtttacggcctgcccagatttccaactcgcggcggttaggtttcaccagccacggtgccgctttcaaacctgctactaacgcttcacggctactatcaaagataatgcaaggacactgactacgcaggcgagtcatccagtcggtgaacgcttccgggctgacgcctgacggtaagcttccgctgacacagaccatatcgaactgaccgagccagctcagagaatcagtcacaaagcgttcccagtcggcgagggtgacttcaaaacccgagaagttgaagtcggtcacttcgccgtctttttccgtcagcttaacgttaattcgggtgcgcccctgtacaacctggaaacggttggcaatgcccagctcgctgaacagttgctgaaaaccatcctgattgtctttacccaggaagccgccaacggtgacatcaattcccaggtcttttaatactttggccacgttgatgcctttacccgccgcatgcagaccggtggttttcaccaggttcacttcgccgcgttcaatttccgggcagaaaccaacaaggtcataagccggattaagggtgatcgtagcaacacgtctgctcattatgcgccctccccaagaccagcagcgatagcgtcgccaatggctttcagcgcctgttcagcatctgcaccctgggcggtaaagcgtaggcgatgacctttcttaacgccaagtgccacaactttcatcagactacgtccgtttgccggtttgccggtgccatcaaggtttgtcacggtaatatcactgttaaattgtttaatggtattgaccagcatggtacctggacgagcatgcaggccgtgttcattgcgcaccacaaactccgcgcttaacacgtcgtcggtcggcgcatcatcgctggtcagcagcgccagcaacgttgccgcatccgctttcagcaagcggtcagctttattgtcgagcaataaatcagcgagacgcttaagaaccgcgatgggctgatcgtcattcatcgccacactcaccagcatggctgccgtttcgccgtccacatcaaaagcatttgccgcacggcttaccgcaatcgcgctacgcagattgccttcggcgctatcgctcagccagataccctgtccgagattcagcggttgttcattgatggctttggtgacgaaagtggcgtcaactgcccccacctctttcagacgcgcagcgttcagcgcctgaagagtcagcagatcgctggcgacgatatccagcgtcagcatttcgttgtcgagcttcagctgctcactctgcttttcgcccatcagtaatgcgcgaagttcttctgctgttgttgctgacttcagttgttcagcaacggaatcatcgctcagtacgtgggtcagctggcgtagcaggcccagatgttcatccgagctggcagcaataccgattgccacgtacgctacctgaccgtcaccccaggtgacgccttccgggaactgaaatacctgaacgccggttttcagcacctgatcgcgggtgtcggtagtgccgtgtggaatagcaataccattgccgaggaacgttgaggtttgctgttcgcgcgccagcatgccattgacgtagccttctgctacattaccggcctgcaccagcgccgcagcgacctggcgaatcgcctcttctttgtctccggccttttcgcccggatggatgtcctgtacggataactggaacatagttctcctctcttgctgaattgaaacgattcagcctctatgagaaaaaaagcgccaacctggcttagggttaaagacaagatcgcgctgaaacgtttcaagaaagcataatacttctgtttcagcacgcaaggaaagccgtaaagttatgagcaaaagtttgatgtgctgcacaattttttgtcatttttcctaattgctgatgggaaaatccgttatcagcaatttcatttcagcagcgtcagcagccaatcagcaacagtgaaatggcattttgattattcgtggcgcttttgatttcgctgtctgtttattttctgacaagcagcgtaaactccgcgtcttcctcttccagtgatcgacctgcatgcataactcccccgcagtctccagcgcgaaatcgtttgacctgacctcgacggcgtttttaatcgttgcctttctcaccggtattgcgggtgctctgcaaaccccgacactcagtattttccttaccgatgaagtacatgcccgtccggcgatggtgggattcttctttaccggcagcgctgtcattgggattctggtaagtcagtttctcgctgggcgctctgataagcgcggcgatcgcaaatcgctgattgtcttttgctgcctgttaggcgtgctggcctgcaccctttttgcctggaatcgcaactactttgttttgctattcgttggcgtctttcttagcagctttggctcgaccgctaacccgcaaatgtttgcccttgcccgtgaacatgccgacaaaaccggacgtgaggcggtgatgttcagctcttttttacgcgctcaggtttcactggcatgggtcattggcccaccgctggcttatgcgttagcgatgggtttcagctttacggtaatgtatctgagcgcagcggtagcgtttattgtttgcggcgtgatggtgtggctgtttttaccgtcgatgcaaaaagagcttccgctggcgaccggcacggttgaagcgccgcgccgtaaccgtcgcgatacgctactgctgtttgtcatttgtacattgatgtggggctcgaacagcctgtacatcatcaacatgccgctatttattatcaacgaactgcatcttcccgagaaactggccgatgtgatgatggggaccgccgccgggctggaaatcccgacgatgttgattgccggatatttcgccaaacgtctgggtaagcgtttcttaatgcgcgttgctgccgtgggtggcgtctgtttttacgcaggaatgctgatggcgcattcacctgtcattctgttgggcttgcagctgctaaatgctatttttattggcattctgggcggcatcgggatgctctattttcaggatctgatgcccggtcaggcgggttcagccaccacgctctataccaacacttcgcgcgtgggctggatcatcgcaggatcagtggcgggcatcgtcgccgaaatctggaattatcacgctgtgttctggtttgcgatggtgatgattatcgccactctgttttgcttactgcggattaaagatgtttaaggcgcggtcagcatttccagatcgataagccaggtcatggcctgctgacgcgagttaccgcacatttcagcgctggcttgtaagcctgcacagactttcggtcgcagtggcgaggtgaaaattttacagcgttgctgttcatcaagctgaatgcagggcgtattggcgggcttgccatctggcataccgggaatagggctggaaattgaaggggcagtgcaacacgccccgcaacccggacggcattccatacgttgttctcttaaggttaaccaccggattgatgagcgcgcacagtaccaccttttttgcaccagcaaaagtgcgaataccacttgcccgaaaggcccgtcgcgagtactttgtcgcgatatttttgacattttcgactacaggaatttttcgatgccaagagcgaacgaaattaaaaaaggtatggtactgaattacaacggcaaactgctgctggttaaggatattgatattcagtcgcccactgcccgcggtgccgctacgctgtacaaaatgcgtttttctgatgtccgtaccgggctgaaagtagaagagcgtttcaaaggtgatgatatcgttgacaccgtgacgctgacccgccgttacgttgacttctcctatgtcgatggcaacgaatatgtctttatggataaagaagactataccccgtataccttcaccaaagatcagattgaagaagagttgctgtttatgccagagggcggcatgccggacatgcaggtgctgacctgggacggtcaactgctggcgcttgagctgccgcagaccgttgatctggaaatcgttgaaaccgcaccaggcatcaaaggggcatctgccagcgcccgtaacaaaccggcgacattgagcactggtctggtgattcaggtaccagaatacttaagcccgggcgaaaaaattcgtatccatatcgaagaacgccgttatatggggcgtgctgactaacttcagccgcatgcagaaaagggatagctcaggctgtcccttttttaatttattataccaatcttctattttgcgcttcctgaacaccttacgccctcaattttcactcgttgattgatcgccctcacacttcatcgcattaacaatccagaccaatttcaattgctgtcatataactttacactgtcattgttaatttatcgttactaagacgtgactcctatgaagacaattgcctccgttacgctcccgcatcatgtacacgctccacgctacgatcgccagcagttgcaatcacgtatcgttcattttggctttggcgcctttcaccgcgctcatcaggcgttactgaccgatcgtgtgctgaatgcccagggcggcgactgggggatctgtgaaatcagcttgttcagcggtgatcaactgatgagccagctccgcgcacagaaccatttatataccgtgctggagaaaggtgcggacggcaatcaggtgataattgtcggtgccgttcacgaatgccttaatgcaaaactggattccttagcggcaattattgagaaattttgcgagccacaggtggcaattgtttccctgacgattaccgaaaaaggctattgtattgacccggccaccggtgcactcgacaccagtaatccgcggattattcacgatctacaaacccctgaagaacctcactccgcaccgggtattctcgtcgaagcactgaaacgccgccgtgagcgcggccttacaccgtttaccgtgctctcctgcgacaatattcccgacaatggccatgtggtgaaaaacgcggtgctgggaatggcagaaaaatgttcgccagaactcgccgggtggataaaagaacacgtcagttttccgggaaccatggtcgaccgcattgttccggctgcaaccgacgaatcactggcagaaatcagccagcatctgggggtaaatgatccctgcgcgattagctgcgaaccgtttatccagtgggtggttgaagataacttcatcgctgggcgtcctgcctgggaagtcgcaggtgtacaaatggtgaatgatgtcctgccatgggaagagatgaaactgcgtatgcttaatggcagccactcttttctcgcttatctgggttacctctcaggattcgtccatatcagtgattgcatgcaggatcgcgtatttcgccatgctgccagaacattaatgctggatgagcaagcgccgacactgcaaattaaagatgtcgatttaacacaatatgcggataagttaattgcacgttttgctaatccgtcgctgaaacataagacctggcaaatcgcgatggatggcagccagaaattaccgcaacgtatgctggcaggtattcgcatacatctggggcgtgaaacggactggtcgttgctggcattaggcgttgctggctggatgcgttacgtcagcggcgttgatgatgccggaaatgccattgatgttcgcgatccgcttagcgataaaattcgcgaacttgttgcgggcagcagcagtgaacaacgcgtaaccgccctgctttccctgcgtgaagttttcggtgatgatctgccagataacccgcattttgtgcaggccatcgaacaagcctggcaacaaatcgtacaattcggcgcacatcaggcgctattaaacaccctcaaaatttaacgatttctgcggttaaagcggatgaagctcaccttcgtccgctctccccttctcttttctgccttttttagccaggattaacgctcagttaacttaccagagtattgcggagccgttgtgaccaggaccaacctcatcaccggttttctcggcagcgggaaaaccacgtcgattcttcatctgttagcccataaagatcccaacgaaaaatgggcggtactggttaatgaatttggggaagtcggaattgatggtgctttgctcgccgatagcggcgcattgctgaaagagatccccggcggctgcatgtgctgcgttaatggtttacccatgcaggtagggttgaataccttactgcgtcagggaaaaccagaccgcttgttgatagagccgaccgggctgggccatccgaaacagatcctcgatctgttaaccgcaccagtctatgaactgtggatagatctgcgcgccaccttgtgcattctcgatccacgcctgctgctggacgaaaaaagcgccagcaatgaaaacttccgtgaccagctggctgccgcagacatcattgtcgccaataaatccgaccgtgcgacgcccgaaagtgagcaagcgctacagcgttggtggcagcaaaatggtggcgatcgacaattaattcacagtgagcatgggaaagttgacggtcatcttctggatttgccgcgtcgcaatttagccgagttgcccgccagcgccgcgcattctcatcagcatgtcgtgaaaaaagggttagcagcgttaagcctgccagagcatcaacgctggcgtcgcagtctgaacagcgggcaaggatatcaggcctgcggctggatattcgacgctgatacggtattcgacaccattggcattctggaatgggcgcgacttgcaccggtggaacgcgtcaaaggcgtgctgcgtattcccgaagggctggtacgaatcaaccgtcagggcgatgacctgcacattgaaacgcaaaacgttgcgccaccggacagccgtattgagctgatttccagcagcgaagctgactggaatgctttgcagagcgcgctgttgaagcttcgtttagcgactaccgcgtaaggttgcctgcgtttttcagtaagataattagagaaaatatgattaaaaatttgccgcaaatagtgttgttgaatattgtcggcctcgcgctgtttctttcctggtatattcccgttaatcatggattctggttgccgattgatgcggatattttttatttctttaatcagaaactggtcgaaagtaaggcctttttgtggctggttgcattgaccaacaatcgcgctttcgacggttgttctctgctggcgatgggaatgttgatgctgagtttctggctgaaagaaaacgcccctggcagacgacgtatcgtgattatgggtctggtcatgctattaactgcagtggtattaaaccagctgggtcaggcattaattcctgtaaaacgggccagcccaacattgacttttaccgatattaaccgcgtcagcgaactgctctctgttcccacgaaagatgcctcacgagatagctttcccggcgatcacggcatgatgctgcttattttttcggcattcatgtggcgttatttcggcaaagttgcaggccttatcgcccttattatttttgtggtttttgcatttcccagagtaatgattggcgcacactggtttactgacatcattgtcggttcgatgaccgtgatattgatcggtttgccctgggtgttgctgacgccattaagtgatcgattaatcaccttttttgacaaatcactaccgggaaaaaacaaacatttccaaaacaaataactcacagtaattaacatcatcaggcttatttttatagtgaggataatcctgatgatgcgcaccgtgctttcatccatcgcgcgcaaaaatcattctctaagtaaatgaatggattgcatgcgtttcactcaatcgtactttaattgaccaatcccgcttattaactttctgtatcactttttcttataaaaaatcatgtaaaaccgctcgccaagaccgcaccaatcgggtaatctcgaactcgttttgcctcggcggtagattatcctcacagcatataattttgtgcgttagtccacagatttggccttaaggaattgtttcaacatgcccaggtaattagtctcgtgccgcttggcatttttttataacgatatttgtcgttaaggacttcaagggaaaacaaacaacatggtcaaatctcaaccgattttgagatatatcttgcgcgggatccccgtgattgcagtagcggttctgctttctgcatgtagtgcaaataacaccgcaaagaatatgcatcctgagacacgtgcagtgggtagtgaaacatcatcactgcaagcttctcaggatgaatttgaaaacctggttcgtaatgtcgacgtaaaatcgcgaattatggatcagtatgctgactggaaaggcgtacgttatcgtctgggcggcagcactaaaaaaggtatcgattgttctggttttgtacaacgtacattccgtgagcaatttggcttagaacttccgcgttcgacttacgaacagcaggaaatgggtaaatctgtttcccgcagtaatttgcgtacgggtgatttagttctgttccgtgccggttcaacgggacgccatgtcggtatttatatcggcaacaatcagtttgtccatgcttccaccagcagtggtgttattatttccagcatgaatgaaccgtactggaagaagcgttacaacgaagcacgccgggttctcagccgcagctaataaaccgtttggatgcaatcccttggctatcctgacgagttaactgaaagcactgcttaggcagtgcttttttgttttcattcatcagagaaaatgatgtttccgcgtcttgatccaggctatagtccggtcattgttatcttttaaatgttgtcgtaatttcaggaaattaacggaatcatgttcatacgcgctcccaattctggacgtaagctcctgcttacctgcattgtagcaggcgtgatgattgcgatactggttagctgccttcagtttttagtggcctggcataagcacgaagtcaaatacgacacactgattatcgacgtacaaaagtatctcgatacctattttgccgacctgaaatccactactgaccggcttcagccgctgaccttagatacctgccagcaggctaaccccgaactgaccgctcgcgcggcgtttagcatgaatgtccgtacgtttgtgctggtgaaagataaaaaaacattctgttcatctgcgactggtgagatggacattccactcaatgaattgattccggcgctcgacattaataaaaacgtcgatatggcgatcttacccggcacgccgatggtgccgaacaaacccgcaatcgtcatctggtatcgcaaccctttgctgaaaaatagcggtgtgtttgccgctctgaatctcaacctgacgccttctctcttttatagttcacggcaggaagattacgatggcgtcgccctcattattggcaatactgcgctatctaccttttcttcacgtttgatgaacgttaatgaattaaccgacatgccggtccgtgaaactaaaattgcgggcattcctctgaccgttcggctttatgcggatgactggacatggaacgatgtgtggtacgcatttttactgggcggcatgagtggaactgtcgttggcctgctctgctattacctgatgagcgtacgtatgcgccccggcagagaaatcatgaccgccatcaagcgcgaacaattttacgtggcgtatcaaccggtggtggatacacaagctttgcgagtaacgggcctggaagtactgctacgctggcggcatcctgtcgcgggagaaattcccccggatgccttcattaactttgccgaatcgcaaaagatgattgtgccgctgactcagcacctgtttgagttaattgcccgcgatgccgcagaattagaaaaagtgctgccagtaggcgtcaaatttggtattaacattgcgccggaccatctgcacagcgaaagctttaaagcagatatccagaaactgctcacttccctgcccgcacaccatttccagattgtgctggaaattaccgagcgcgatatgctgaaagagcaagaagccacacaactcttcgcctggctgcactcggtcggcgtagaaattgctattgatgacttcggcaccgggcacagcgcgcttatctatcttgagcgttttacgctcgattatctgaaaattgaccgtggatttatcaacgccatcggtacggaaacgatcacttcacccgtacttgacgcggtgctgacgctggcgaaacgcctcaatatgctgacggttgctgaaggggtcgaaacgccggaacaggcgcgatggctaagcgaacgcggcgttaatttcatgcaaggctactggattagtcgccctttaccgctggacgattttgtccgctggctgaagaaaccgtatacgccgcagtggtaaggtgtgcttacgtcccttattattcatagtgaaagcatgccggattgcggctaatgatgagtaaaaggaaatccattgcagatgattgtgcgcatactgctgctgtttatcgctctgttcacctttggtgtgcaggcgcaggctatcaaggaaagctatgcctttgccgtgctgggcgaaccccggtacgcgtttaatttcaaccattttgattatgtgaaccccgccgcgccaaaaggtgggcagataacgttgtcagccctcggcaccttcgataatttcaaccgctatgcactgcgcggcaacccgggcgcacgcaccgagcagctgtacgacacgctatttacgacttccgatgacgaaccaggcagttattacccgctgattgctgaaagcgcacgctatgctgacgattattcctgggtggaggtcgctattaatccgcgcgcccgttttcatgatggttcgcccattactgcccgcgatgtagagtttacttttcaaaaatttatgaccgaaggcgtgccgcaatttcgtctggtctacaaaggcaccaccgtcaaagccattgcaccgttaaccgtgcgcattgagttagctaaacccagcaaagaagatatgctgagtctgttttcgctgccgatatttccagaaaagtactggaaggatcacaaacttagcgacccgctcgccacgcctccgcttgccagtggtccgtaccgcgttacgtcctggaaaatggggcaaaatattgtctattcccgcgtgaaagattactgggcagcaaacttaccggtaaaccgtggacgctggaatttcgacaccattcgctacgattattacctcgatgataatgtcgcctttgaagcgtttaaagcaggtgcctttgatttgcgtatggaaaacgacgctaaaaactgggccacgcgttataccggtaaaaatttcgataaaaaatacatcatcaaagatgagcaaaagaacgaatcagcccaggatacgcgctggctggcgtttaatatccaacgtccggtattcagcgatcgccgggtccgggaagcaatcactctcgcctttgactttgaatggatgaacaaggcgttgttttacaacgcctggagtcgcacgaacagttattttcagaataccgaatacgcggccagaaattaccccgacgccgcggagctggtgcttctggcaccaatgaaaaaagatctaccgccagaagtcttcacacaaatctaccagccgccggtatctaaaggcgatggctacgatcgtgacaacctgttaaaagccgacaaacttctcaacgaaacgggctgggtgctgaagggtcagcaacgcgttaatgccacaacgggtcagccgctcagctttgaattattgcttcccgcaagcagcaatagtcagtgggtattgccgttccagcacagcctgcaacggctgggtatcaatatggacattcgcaaggtggataactcgcaaatcactaaccgcatgcgcagtcgcgactatgacatgatgccgcgcctatggcgggcgatgccgtggcccagttccgatttacagatttcctggtcatcggaatatatcaattccacttataatgcccccggcgtgcaaagcccggttatcgactcgctgatcaaccaaattattgccgcgcagggaaataaagaaaaattactgccgttggggcgagcactggatcgcgtattaacgtggaattattacatgctgccaatgtggtacatggcggaagaccgtctcgcctggtgggataaattctcccaacccgctgtacgccctgtttacagcctgggtatcgatacctggtggtatgacgttaataaagcggccaaactgccgtcagccagacaacagggagagtagatgggcgcttacctgattcgccgtctgttgctggtgatcccaacgttatgggctattatcactatcaactttttcatcgtgcaaattgcgcctggcggtccggtcgatcaggccatcgccgccattgagtttggtaatgccggagtattacccggcgcaggcggtgaaggtgttcgtgccagccatgcgcaaacgggtgtcggcaatatcagcgacagtaattaccgtggcggacgcggattagacccagaagtgatcgctgagatcactcatcgctacggtttcgataagccgatccacgaacgttacttcaaaatgctctgggactacatccgctttgattttggtgatagcctgtttcgcagcgcctcggtgctgacgctgattaaagacagtctgccggtttccatcaccctcggattgtggagcacgctgattatctatctggtgtcgattccgttaggcattcgcaaagctgtttataatgggagtcgctttgacgtctggagtagcgcatttatcatcatcggctacgccattccggcctttttgtttgccatcctgctgattgtcttcttcgcgggcggcagctatttcgacctgttccctctacgcggcctggtttccgctaactttgattcgctgccgtggtatcagaaaatcaccgattatctgtggcatatcacgctaccggtgctggcgacagtgattggtggctttgcggcgctgaccatgctgaccaaaaactcattccttgatgaagtgcgcaagcaatacgtggtgaccgcgcgtgcgaaaggggtaagtgagaaaaacattctctggaaacatgtgttccgcaacgccatgctgctggtgattgccggttttccggcgacgtttatcagcatgttttttaccggctcgctgctgattgaggtgatgttttcactcaatggtcttggcttactgggctacgaagcgaccgtctcgcgcgattatcctgtaatgtttggtaccttgtatattttcaccctgattggcctgctgctgaatattgtcagtgatatcagctatacgctggttgatccgcgtatagattttgagggacgttaatgtcgcgactcagccccgtcaatcaggcccgttgggcgcgttttcgtcataaccgtcgcggctactggtcgttatggattttcctcgttttgtttggtttgagtttgtgttctgaacttatcgctaacgataaaccgttgctggtgcgttatgacggcagttggtatttcccgttgttgaaaaactacagcgaaagcgattttggcggcccgctggcaagtcaggctgattatcaggacccgtggctgaaacaacggctggaaaataacggctgggtactgtgggcaccgattcgctttggtgctaccagtatcaactttgctaccgataagcccttcccttctccaccctcccggcaaaactggctgggaacggatgccaacggcggcgatgtgctggcacgcattctctatggcacgcggatctcggttctgtttggcctgatgctgactctctgttccagcgtgatgggcgtgctggcgggggcgctacaaggctattacggcggtaaagtcgatctctggggacaacgctttattgaagtatggtcggggatgccgacgctgtttttgattattttactttccagcgtcgtacagcctaacttctggtggctgctggcaattactgtcttgtttggctggatgagtctggtcggcgtggtgcgggcggagtttttacgtactcgtaatttcgactacattcgtgcggcacaggcgcttggcgtcagcgatcgcagtatcatcctgcgtcatatgttgcctaatgccatggtcgcgaccctcacctttttaccgtttattttatgtagttcgataaccaccctgacctcgctcgatttcctcggcttcggtctaccgctcggttcaccgtcactcggtgaactgctgttacaagggaaaaataaccttcaggccccgtggcttgggatcaccgccttcttgtcggtggcgatattattgtctttgctgatctttattggtgaagccgtccgcgacgcatttgatcctaataaggcggtgtagcatgacgcaaactctgttagcgattgaaaatttgtcggtgggttttcgccatcagcaaaccgtacgtacagtagtcaatgatgtttcactacagattgaggctggcgaaacgctggcgctggtgggtgagtcaggttcaggcaaaagcgttaccgcgctgtcaattttacgcctgctcccttccccgccggttgaatatctctccggcgatattcgttttcatggcgaatcgctgcttcatgccagcgatcaaacgttgcgcggtgtacgcggtaataagatcgccatgatttttcaggaaccgatggtgtcgttaaatccattgcataccctggaaaaacagctttatgaagtgctttcactccaccgcgggatgcgtcgggaagcggctcgtggcgaaattcttaactgccttgatcgcgtcggtatccgccaggcggcaaaacggctgacagattatccgcatcagctctccggcggcgaacgccagcgggtgatgattgcgatggcgctgttaacgcgaccggaattattaattgccgatgaaccgaccaccgcactggacgtctctgtccaggcgcagattttacagctgttgcgcgaactgcaaggcgagctgaatatgggcatgctgtttattactcataacctcagcattgtcagaaaactggcccaccgcgtggcggtaatgcaaaacggtcgctgtgtcgagcaaaataacgccgctacgctatttgcctcacccactcatccttacacacaaaagctactcaacagtgaaccgtcaggcgatccggtaccgttgccagaacctgcctcaacgttgctggatgttgaacagcttcaggttgccttccccattcgcaaagggattttgaagcgcattgtggatcataatgtggtggtgaaaaacatcagttttacgctacgggcgggtgaaacactgggtttagtgggcgagtctggttccgggaaaagcacgacgggactggcgctgctgcgactgattacctctcagggcagcatcgtctttgacggtcagccactgcaagatttaaatcgccgccagctgttacctactcgtcatcgtattcaggtggtatttcaggatccaaactcctcgctcaacccacgactcaacgttttgcagattattgaggaaggcttacgggttcaccagccgacgctttctgccgcacaacgcgaacaacaagtgatagccgtgatgcatgaagtgggattagatcctgaaacacgccaccgttatccggcggagttctctggtggtcagcgacaacgtattgcgattgccagggcattaattcttaagccctcactgatcatacttgatgaaccgacatcatcactcgacaaaacggtacaggcgcaaatattgacgctattgaaatcattgcaacaaaagcatcaactggcctatttgtttatcagccacgatttgcacgttgtccgcgcgttatgtcatcaggttatcgtactgcgacaaggggaagtagtggaacaaggaccgtgcgcgcgcgtgtttgccgcaccgcagcaggagtatacgcgtcagctactggcgttgagctgacgcttaaaaaggattgtagtttgaaaagggttcggcaattgccacaccaaaatttttcaatcggcatgttgcagcaaactcgtcctggcgatttacaaacaggcacggctcaccttcacactccagcaccgaacatggaacttcgatgtcgcttaacgcctggcttagtttatacatcaccgaccatgcattatcaccatccgggctaagcaatttaagcgccaccaggctgttgtcaccgcacggtccattttgcggaatcggttcaaccttcgaacctgcgaaaccagcagaccagcgaaagttctgcggtagacgatggacgattgagagttgtaatgaagtcacttattttccccggaagcacatttacttcacaatttatttacatcaattttaacacatcatcaacaatccgtctttatacagatcgtaaagattgatgcctcgcctgcatggcctctatggctctgatttaagtaatatctgcgggcgtggtcacgtttgcggggctatatgtacccgtttctgcgatctaactcaacctttttaactacaatgatgtgactttttacataaattgattttacataaaataaacatatatcgggggaatgatagatttgtggttgacatgcatcaacaaaggaagccttttagcttcctcgttgtgcaatagatcaccgttttttcggtcgactggcgtacagacagaagagaatggagctggttgcgcagaatgcaattgaccaaatcatcggccatgcagagttaaaggtcgcaagagaaagcaatgcgccaacaattgcccctatgccaaaacggaaggttcctgccagcgaagatgccgttcccgccatatggggaaactcatcaagaatgaccgccatcgcattggatgacaccatagacacgcagcccacaaacgccgcaacgccaaccaccagcgaccagaatcccagccccagcagcgcactgatgaccatccacgctgccataataaattgtatccacaaccccgagcggaacatatttaacgcgccaatgcggcggacgaagcggctgttaaagatggtcatcacgaacagaaaaacaatgtttagcgcaaagtaataaccaaagttttccggtgcaacgtggttgatttcaatgtagacaaacggtccggcgctcaggaacgagaacattccggcaaagctgaaaccgctggccagcatataactcaggacacgcttatgacggaacagcgccgcaaagttaccaatagtggtacgaatgtgaaaaggctggcgaggatccagaagatgtaatgccagctcagccacaccagcacccagccgccaactatcggtgccatcagcggtgcaatggtcgtcaccagcatgacaaacgacatcatccgcgagaactcttctttcgggtaaatatcacgcatcaaagcgttgataaccacgctggccgcagccgcagccagcccgtggaagaaacgcatcacaatcagctgatcgatggtttgtgccaacgcacacgccaccgcggcggcggcaaacaccagcgtaccgccaagaaccaccggcttacgcccgaagctgtctgccatcggcccgtagattaactgccccaacgcaaagcccagaatataagtactcagggtcatctgcgtactgcccgccggtacgccaaactgcgctgaaattaccggtagcgcgggcagatacatatcaatcgacagcggcatcaacatggccagcaggccaaggataaaaacaatagcaaacgacgaatgctgtcgggtggtcacaacgggctcctgaaagtcattgaaaagttagacgacgctggcaatttcttcttcagttaacggacgatattcaccgggggctaaatcagcatccagcgtaatgccgccaatacgttcacgatgcagctcaaccacatggttacccacggcggcgaacatgcgtttcacctgatgataacgcccttcgctgatggtcagacgaacctgcgttggggtaatcacttccagcaccgccggcttagtgagatctttttcgttatgcagctgcacgcctttagcaaattgttctgccgtatcgtcagctacgggtgataccagcgtcaccagataggtcttctcgcaatgatggcgcggagaagtaatgcggtgcgaccactgaccatcatctgtcattagtaccagaccggtggtatcgatatccagccgccctgcggcgtgcagtttccacgctaccggttcatctagaaaatagagcaccgttgggtgatcagggtcgtccgtggagcaaacataaccctgaggcttattgagcatgaagtaacgtggaccgtgttgctgcgccagcgggttgccatcgtaagcgacatcatgttcaggaagcagtttgaacgctgcattacggacgatttcgccatcgacggtgacacgattgccgcggatttcacgcccggcaatagcacggctaacgccgagttgctgtgcgataaatttatcaagtcgcatgtgtgtgattttgcctgtaaaaaacggaggtcgggtaatgacccgaatatctgaactgttgtctgcccagtatagcggtctaataacatccctcaagggaaaaagatccgtggcatactattagcagaataatctacctacgcgagaccatgatttttacacttcgcccatatcagcaagaagccgtggatgccacgctcaaccattttcgtcgtcataaaacccctgccgttatcgtgctgcccaccggtgcaggtaaaagcctggtgatagcggaactggcacggctggctcgtggtcgcgtactggtgctggcacacgttaaagaactggtggcgcaaaaccatgcaaagtatcaggcgctggggctggaagccgatatttttgccgccgggctgaagcgtaaagagagccacggtaaagtggtatttggcagtgtgcagtcggtcgcccgtaatattgatgcctttcagggtgaattttcgctgttgattgtcgatgaatgtcaccgtattggtgacgatgaagagagccagtatcagcaaatcctcactcacctgacaaaagtgaatccccacttacgcctgctggggctgactgccacgccttttcgattgggcaaaggttggatctaccagttccattatcacggcatggtacgcagcgatgagaaagcccttttccgtgactgcatttatgagctgcccctgcgttatatgattaaacacagctatctgacgccgccagaacgactggatatgccagtagtgcaatatgatttcagccgcttgcaggcacagagcaacgggctgttcagcgaagccgatctcaaccgtgagctgaaaaaacagcaacgtattaccccgcacatcatcagccagattatggagttcgccgaaaagcgtaaaggagtgatgattttcgccgcgacggtcgaacacgcaaaagagattgtgggattactgcctgccgaagatgcagcactgattactggcgacacccccggcgctgagcgcgatgtgttaattgaaaattttaaagcccagcgttttcgctatctggtcaacgtcgcggtactgaccaccggatttgacgccccgcacgtcgatcttatcgccattctgcgccctaccgaatcagtgagtctttaccaacaaattgtcgggcgcggtctgcgtctcgctccgggcaagactgattgtttaattcttgattatgcgggtaatcctcacgatctctacgcgccggaagttggtacaccgaaaggcaaaagtgacaacgttccggtacaggttttctgccctgcctgcggttttgccaacaccttttgggggaaaacgaccgccgacgggacattgattgaacactttggtcgccgctgtcagggatggtttgaagatgacgacggtcatcgcgaacagtgtgacttccgtttccgttttaaaaattgcccgcaatgtaacgcagaaaatgatattgccgctcgccgctgccgcgaatgtgacacggtactggttgatccggatgatatgttaaaagcggcgctacgactgaaagatgcgctggtattacgctgtagcggcatgtctttgcagcatgggcacgacgagaaaggcgaatggttgaaaatcacctattacgatgaagacggtgcggatgtgagtgagcgtttccgtctgcaaacacctgcccagcgtaccgccttcgagcagctttttatccgcccgcatacgcgcacaccgggcatcccgctgcgctggatcaccgccgccgatatcctcgcccagcaagccttattgcgacccccggattttgtcgtcgcccgcatgaaaggccagtactggcaggtgcgtgaaaaagtgttcgattacgaaggtcgttttcgtcgggcgcacgaattacgcggttaatggtagttttgattgatgtataaggcgattgagtatagaatctcacccgcttttgcatacgcaaagcagatcacttacctgttgctgggtcgcctgtagcaggattaatttaagagagaaagaaatgtttactatcaacgcagaagtacgtaaagagcagggtaagggtgcgagccgccgcctgcgtgccgctaacaagttcccggcaatcatctacggtggcaaagaagcgccgctggctatcgagctggatcacgacaaagtcatgaacatgcaagctaaagctgaattctacagcgaagttctgaccatcgttgttgacggtaaagaaatcaaagttaaagctcaggacgtacagcgtcacccgtacaaaccgaagctgcagcacatcgacttcgttcgcgcttaattgctgaataagttgtaaaaaaccccgctccggcggggttttttgtatctgcagattatgcctgattacggtattgctattttttgcaggccagataaggcgttcacgccgcatctggcattcagaacacaaaaccgattaattgccgccagacgtccggcgctgcaattggtcgcgcaaattcggcggcgtgcctttaatggtcagggtatcggtcgccggctcccagaagatgcgttcacctaacagcatcgcatcaaagttaatagtcaagccaccgccgctaccggcaaacttcgtcaactgacgcagtgtgctccggtctgccgggaagctctcttccagttcgtagcctttttcagccgcaaactccgtgaagctcacttcgcttacgcctgccagctctttcgacagcgattccagttcgatctcttcgcctgcctgcagctgctcattacagtagctataaacctgctggcgcacgttctgtcgctctgctttatccagttgtgcttcggcagtgaaatcatcaaccgcttgcaacagcccacggttttgcgctttcgtgttcaatccttcgctggccccgaggaaatccataaagaaatccgccactttgcgccctactcgccctttcaggaaagtgagatagcgggtggactctggattggtttcccattcggttaaatcgatacgcgcaacaatatccgcatgattgatatcaagataatgggttgggttgatgtcgagattttcgttaacacgcatactgctcaggttgctcagaactgccaccagcagatactccaccgccagataacggtagtggcaaaacagcacgaatccaccgtcagcaaaaggatatttcgctaattcgtcacgcaggcgaccagttgccgcgcggctaaatgccagaaagtcctcttcgccctgacgctgtaagcgcagcgtctgcgccagttcactctcttcgctaaacaagccgtaagctttatttttggcgctatagacccgatgcagttctgccaccatctcaacgacggtttctgtcggttccagcaatgaatcgcgcaacaccagctcaaggttctgctcatcacgcttgataagctggtgcagagcaatctggttgatatccagactcatgataaactctcctttaagaccgggcggtattcaaccaccgccggttaagcgacgcaataaaagatggcggtcattttacagaaggcagcgtaacgagaatgatttaacgcataaaaaagcagaaaaaaaaccgttgctacggtaatatgttgccctttcatcaactaactgatttcgatttatgccacaaatttcccgctacagtgatgaacaggttgaacaattgctcgcagagctgctcaacgtactggaaaaacataaggctccgaccgacctttccctgatggtgttaggcaacatggtcactaaccttatcaacaccagcattgccccggcccaacgccaggcaattgccaactcttttgcccgcgccttacagtcctctatcaacgaagacaaagcgcactaagggaaacagataacaggttatggtaactcatcgtcagcgctaccgtgaaaaagtctcccagatggtcagttgggggcactggtttgcactgttcaatattctgctttcgctcgtcattggcagccgttacctgtttatcgccgactggccgacaacgcttgctggtcgcatttattcctacgtaagcattatcggccatttcagcttcctggtgttcgccacctacttgctgatcctcttcccgctgacctttatcgtcggctcccagaggctgatgaggtttttgtccgtcattctggcaacggcgggaatgacgctattactgatcgatagcgaagtctttactcgtttccatctccatcttaatcccatcgtctggcagttggttatcaacccagacgaaaatgagatggcgcgcgactggcagctgatgttcatcagcgtgccggttattttattgcttgaactggtgtttgcgacgtggagctggcaaaagctgcgcagcctgacgcgtcgtcgacgcttcgcgcgcccgctggccgcattcttatttatcgcctttatcgcctcgcatgtggtgtatatctgggccgatgccaacttctatcgcccgatcaccatgcagcgcgctaacctgccgctttcgtacccgatgacggcgcgacgttttcttgagaagcatggtctgcttgatgcgcaggagtatcaacgccgtcttattgagcaaggtaatccagacgccgtttccgttcagtatccgttaagcgaactgcgctatcgcgatatgggcaccgggcagaatgtgctgttgattactgtcgatggcctgaactactcacgcttcgagaagcagatgcctgcgctggcaggttttgctgagcaaaatatttcgttcacgcgccatatgagctccggcaacactacagacaacggcatctttggcctgttctatggtatctcgccgagctatatggacggcattctgtcgacccgtacgcctgcggcattaattactgcgcttaatcagcaaggctatcagctggggttattctcatcagatggctttaccagcccgctgtatcgccaggcattgttgtcagatttctcgatgccgagcgtacgcacccaatccgacgagcagaccgccacgcagtggatcaactggctgggccactacgcacaagaagataaccgctggttctcgtgggtttctttcaatggcactaacattgacgacagcaatcagcaggcatttgcacggaaatatagccgggcggcaggcaatgtcgatgaccagatcaaccgcgtgctcaatgcactgcgtgattctggcaaactggacaatacggttgtgattatcactgccggtcggggtattccgctgagcgaagacgaagaaacctttgactggtcccacggtcatctgcaggtgccattagtgattcactggccaggcacgccggcgcagcgtattaatgcgctgactgatcataccgatctgatgacgacgctgatgcaacgcctgctacatgtcagcacacctgccagcgaatattcgcaaggtcaggatttgttcaaccctcaacgccgtcattactgggttactgcagcggataacgatacgctggcaattaccaccccgaaaaagacgctggtgctgaacaataacggtaaataccgcacttacaacttacgtggtgaaagagtgaaagatgaaaaaccacagttaagtttgttattgcaagtgctgacagacgagaagcgttttatcgctaactgattaattataaatcagttagcgaaatatcttacttgcaatcggtgtggaaaacggtagtattagcagccacgagtcggcacgtagcgcagcctggtagcgcaccgtcatggggtgtcgggggtcggaggttcaaatcctctcgtgccgaccaaaaatcccaagaaaaaaccaacctttacggttggtttttttatatctgcaattaatttgataaacagaccgtgacacatcacagcctgtttattttctgttatcagaacgtccagaccactcccgcctgagtattccacggcgattctacccctgcgccattgccatagctgactgacaaatgaccgcttaacgtcggggtaaacgatgaccttatcccagcctgataaacgccacgggttccagccacatcattattaaatttgccatcgtcattaactttcacatggttagaatcggcctattcctgacgcacggcggctttcagccagggttccaacgtcgtaccgttttgcaggtccatgtgatagcttaccgccgttcccgcttcagcgcgtaatatccgggtatttcccacatccgcgcgcatgccgtttgataacgtgtagtcctgaccatctgtggtaaagccggtaaaggcgagataggggctaacactccacaatccgtcaacccaacggaacccgctctcaacatgagcacccgcgccgttactattgtaatcgccaaacgctgttgccccattactcatcttgccatggatggtgttggcaaaacggtcaactttcaccaccccatcaacataggcaccgttctgatgctcccaaccggcataagcccccagggtgtagctatcaatattgcctttgccgccgcgatcaaaaccaatatcagaatgagagtaatcaaagaacaagccgcgaattgtgctgctttcttcacgggagaaacggctatcgataccgagcgtcaggcccgtcaatgtttgctcaaagccagctcccgcatcagtggtcacgttgttgcgggtgttaattgccgaactccacatcgccgtatcgtaattaacgccttttacgctaccaagacgctcacgcacggtgtccagttctgcatcaaataccagcggttgtgctgctgccatgttcagcacatcagtggttgaaggggtaatttgcgcgcgattctctgcgaggctccagctatggttgccattatccagcaaggtatattcatacgtaccgatatcaacaacgcctccggcattgcccaacgtgaatgcagcatcaccgccgcccgtcgttaccagtgtaaggctatctcctgctgccgggctggcccccgtgtccgtcacgaatattttgaaatcacctgttgcctgaccgatgacgttgagctgatcgctctgatgattagccatatcggtacgcatataaaattgccgtttcccgacagggtattggtggtcaacgtaatgaaattttccgcacttgccgtcacagatgaacgagtcactggctcagccatcataatcacatttgcgccggacatcgcaaggttggctaagttgaggcgagtgttttggttcgtcgtagtgatatcggcaatgatggtccatgcgctattttcgagcgaaacgtccgcttggctggtatccacggcaccatgcgttctaaaagaagcgccctcagaaaccactaccttacccaccaacatagcgggtgcataatttattttcggcttcatgacctcaagaatgccatcattccctctgactgacacgttaaccattgtgccagcccagacattagcgcggccattgttgataaccatattttcagagatggctttagaggaatacgtgatacttccattctgatctgatcgaccgagatcatatacagcatttgcctgcactttcgtaccagtatcctttcccagcgattgcatagtggcatgctcatcaaggatagtgtcaatggcctgagtgtcctccataacaatgagcccggagccatcatccagttcataattttttgacacaccatcctttatactaaattggcctttactgtttgtaccactcacttccagcgcattcgttgagacaattaatttcccgcctgcttttttatcaacgccagttgcagtcccgccatccataacctccagtaagccgccactatccacagtggtattataagcgaagtcattttcttcaactcgcaaacttccgccgttttccaacagcatattgttagcaataccattcttgatttcgaactgaccgagacggtttgttccgaatacctccatgacccgcgtggttgttttaatagcaccgcctgctttctgatctaccgcaaatgctaatcccccgtctttaacctccagtaatcctcccttttcgatagcggcaaagacggcaatcccatctttttcaacaattaagcgcccgcctttaatcgtgggatcattcgccgcgcctggatttgcccctatatttccagacacctgttatcacttaacccattactggcttgctgccgtagatattcccgtggcgagcgataacccagtgcactatgcggatgccattcgttataatgctcgaacgcctctgcaaggttctttgctgccgttaacccgtctggtttgggcatgacactgatgtagtcacgctttatcgttttcacgaagctctctgctatgccgttactctccggactccgcaccgccgtgctcttcggttcaagccccaacatccgggcaaactgccgtgtttcattagcccggtagcatgaaccattatccgtcagccactctactggagacgccggaagctcgttgccgaagcggcgttccaccgctcccagcatgacgtcctgtactgtttcactgttgaagccgcccgtagtgaccgcccagtgcagtgcctcacggtcacagcagtccagcgcgaacgtgactcgcagtttttctccgttatcacagcggaactcgaacccgtcagagcaccatcgctgattactttctttcacagccactctgcctgtatgtgcccgtttcgatggcggtacagcaggttttcgctcaagtgtcagcgccagtgatataagacggtaattcgccatttggattgtccgctccacccaacatgttgtttccttaaggttctcacaccagaaaggacatcaacatgctgagcagagaggacttttacatgataaagcaaatgcgccagcagggcgcgtacatcgtcgatattgcgactcagattggttgctctgaacggacggtcagacgctacctcaaataccctgaaccgccagccagaaagacccgccacaaaatggttaagctgaaaccgtttatggattacatcgacatgcgcctggcagagaatgtctggaatagcgaggttatcttcgcggagattaaggcaatgggttatacgggcggacgttccatgctgcgttactacatccagcccaaacgtaaaatgcgtccgtcaaaaagaacagttcgcttcgaaactcagcctggataccagctccagcatgactggggcgaagttgaggtggaggttgccgggcaacggtgcaaagttaactttgcggttaatacgctggggttctcccgcagcttccatgtcttcgccgcaccaaaacaggatgctgagcatacctacgaatcactggttcgcgccttccgctacttcggtggttgtgtgaaaacggtgctggttgataaccagaaggctgcggtgctgaagaataacaacgggaaagtcgtgttcaactccggattcctgttgctggctgaccactataacttcctgccacgggcatgccgtccacgcagggccagaacaaaaggtaaggttgagcggatggtgaaatacctcaaggagaacttcttcgtccggtaccgcaggttcgacagcttcactcatgtcaatcaacaactggagcaatggatagccgatgtggctgacaaacgggagcttcgccagttcaaagaaacgccggaacagcgcttcgcgctggagcaggaacatctgcagccgttaccggatacagacttcgataccagttacttcgatatccgccatgtgtcctgggacagctatatcgaggttggtggtaatcgttacagcgttcccgaagcgctgtgtggtcagccggtatcgatacgaatatcgctggatgacgagttgcggatctacagtaatgagaaactggtggcctcacatcgcctctgttcagcatcgtctggctggcagacagtgccggagcatcacgccccgctctggcagcaggtcagtcaggtggaacatcgaccactgagtgcctatgaggagctgttgtgatgcatgaactggaagtcctgctgagtcgcctgaaaatggagcatctgagttatcacgttgaaagcctgctggaacaggcagctaaaaaagagctgaactaccgggagttcctgtgcatggcgctacagcaggaatggaacggcaggcatcagcgcggtatggagtccaggctgaagcaggctcgtctgccgtgggtcaaaacgctggagcagttcgactttaccttccagccgggcatcgaccgtaaggttgtccgggaactggctggtctggcgttcgtggagcgcagcgaaaacgtgatcctgctgggccctcctggtgtcggaaaaactcatctggccatagctcttggcgtgaaagcggtggatgcgggacatcgggtactgtttatgccactggacagactgatcgcgacactgatgaaagcgaaacaggaaaaccggctggagcgtcagctacagcaactgagttatgcccgggtgttgatcctggatgaaataggctatctgccgatgaacagagaggaagccagtctgttcttccggctactgaaccgtcgatatgaaaaagcgagcatcatactgacgtcaaacaaagggttcgcagactggggagaaatgttcggagatcacgtactgacaacagcgatcctggatcggctgctacatcactcaaccacgctgaatatcaaaggagagagttaccggttaaaagagaaacgtaaagctggagtgctgaccaaaaacacaacgccaatcagtgatgatgaaatggtggaaagcggacagcatcagtaacgaaagtatttagcgggcatgaaaatggcaaataacggtcaaacatcgtggcgttgacacaagcaacagcgcattctggcgcatgatccggtaaacacgtttggcattgatcgcaggcataccatcaagttctgcctgtctgcgaagcagcgcccatacccgacgataaccatacgtgggcagctctccgataacatggtgtatacggagaagcacatccgtatcatcagtgtgacgactgtggcggccatccatccagtcatcggttcgtctgagaatgacgtgcaactgcgcacgcgacacccggagacaacggctgactaagcttactccccatccccgggcaataagggcgcgtgcgctatccacttttttgcccgtccatattcaacggcttctttgaggagttcattttccatcgttttcttgccgagcaggcgctggagttctttaatctgcttcatggcggcagcaagttcagaggcaggaacaacctgttctccggcggccacagcagtaagacttccttcctggtattgcttacgccagagaaataactggctggctgctacaccatgttgccgggcaacgagggagaccgtcatccccggttcaaagctctgctgaacaattgcgatcttttcctgtgtggtacgccgtctgcgtttctccggtcctaagacatcaatcatctgctctccaatgactagtctaaaaactagtattaagactatcacttaaataagtgatactggttgtctggagattcagggggccagtctagcgccataaacctgtagcactccattattgagcgtagtctggtttaccgcgccacccatttgaacaatttgataaccatcatttaatactgagtattctgcagtgccattcatttcaatgtactgatacccgccgttaatttcagtattactacttacaccaaattcttttatatgctgttctccgccaggattgattttcgtattattggcggtcccataaaccagctggatatctttttccaggccaacaccatcaactgtctcaccatactcaactgttgatgccaatgctatgggtgaatataacgctgtagccaccagaacagatattgcggaacgacaaagagaaacagaaccagattgatgcattgagctttcatcctatgaaattaattgctgttaaaagcattgggtacagaaaatacccatagctccatacccggagtcagtttttaaaaactgtttaaagaaatgcacaagtattgtgattgattttttagttgtttttcttgatgagaagctgatgcaaaattccgtctttataatgaaaatgatgccaaagcgaacggcaaggttgtagttttcactacatgtccatacataaaatggggtaacattcacgcgcctggtagcgttaccaacgctacgctcaaacataatgattctaataaaacctcaggagactactatgcctgaagcaacgccttttcaggtgatgattgtggatgatcatccacttatgcgacgcggtgttcgtcagttactggagcttgatcctggctttgaagtggtcgccgaagcgggcgacggcgcgagcgcgatcgatctggcgaatagactggatatcgacgtgatcttgctggatctcaatatgaaaggtatgagtggcctggataccctcaatgccttgcgcagggatggcgttaccgcgcaaattattatcctgaccgtatccgatgcctccagcgatgtctttgcgctgatagacgcaggcgcagacggttatctgctgaaagacagcgacccggaagtgttgctggaagcgattcgtgccggagcgaaaggcagcaaagtctttagcgaacgcgtcaatcagtacttacgtgaacgtgaaatgtttggcgcggaagaagatcccttcagcgtgctgacggagcgcgagctggatgttctgcacgagctggcacaggggctgtcaaataaacagattgcctctgtgttgaatatttccgagcagacagtaaaagttcatattcgaaatctgctgcgtaaactcaatgtccgctcacgcgtggcggccaccattctgttcctgcaacaacgcggggcacaataaaaatagcccgatggcatcaccatcgggcctctttttatttactctcctgcggcgacaaatgttgcatcgcctgcgcgatactacgttcaatcaccgcacggcgagtatcgttggcaggtaagagtttcaacatcatctcccacgcggcaacggcttcgccaaatcgctgctgctcaaaggcattaaacgcatacatgcttagcacacggatattgctatggtccgttctcaccagctgacgtagcagttcgccgccgaggcggttgtcgttgggatcagatgaacgtgtcaacgcttcagcataacccagtgcggcatcactgtttttcggatcgaggcgatacgcagtagcgtatgcatcggtggcgatactggcgttacccagcgccatgccaacgcggcccaacataatccagccgtctatatctcccggatttttttgcagttgagtacgcatccccagcgcaaggcgcgacatctcttcttcgttgagcggatcagctttcggatccagcgccctgtccagcaacgccggagcctgtgccgtggcctgctgccagattttcacctgttgataatttccggtctggtagtagctgacgccagccacaattaacgccaccacaatgcccggcaaataagcgacatatccggcacgcttaccttccggcacgctttgttcaggaaacgcttccggcaccacgcgtacccgacgccgcgagcgggcgtatatgacccaaccgccaatgccaatagctactactggcagcacccacagcagcacggtcagcggcgttaacggcggatcgtaagtgacgaagttgccgtaacgcgccaccatataatcgacaatctcttttttacttttaccttcctgcatcagttcatacactttctggcgcaggtcggtggcaatcatcgagttggaatcggcaatgctgttgttctggcatttcgggcagcgcagttcttcagtgagctgacggaactgttgttcctgtgcttcatctttaaactgcaacacgtcgatggtcgccagcgctgagccggagatcatcagcatcagcatgcccaataaaaacctcattgtgcggcctccttactgtatttctcccacagcggcttgatctcttcttcccagacgcgaggattgagatcgcccgcatggcgatagcgaatgatgccgttgccgtcaataaggaacgtttctggcgcgccatagacaccgagatccagccctaacatgccatcgccatcaaacaggcttagcgcgtaaggattgcccagctctttcagccagctgattgccttctggcgatcgtctttatagttcatgccgactacgcggatgccctgcgcagaaagctgattcagatattgatgttccgcacggcaggtcggacaccaggtcgcccagacgttaagcagcactggtttgccctgagtcagcacatccgcctgataaaactgccccggattgtccagtgattcgaggcgaaacttcggcactggcttgccaatgagcgccgattccagattggtcggatcatccccttcggcattacgcgccagctgccacagcagcgccgcggcaatcgccaggaagataatcaacggaattaacaatactttgcgcttcatacagcctccggcgcagttttttgcggactcacgcgcttacgatagcgaggatcaaacagacacagcagtccgcccaacgccatcatcagcccgcccgcccaaatccagcgaacaaatggtttgtagtaaagacgcacagcccacgcgccgttttccagctcttcaccgagcgcggcgtacaggtcacgcgtgatgccaccgtcaatcgccgcttcggtcatcatcgacccggcagtgttgtaataacgtttttccgcatacagcactgtttccggtttaccctctcgcgttacgccgatagtcgccacaccgccacgccagttcgggccagtcacctctttgacatcacggaaggtgaagcgatattcatgaatatcgacgctatcgccggacttcatgcgcacatcacgctcaacgctatagttctggctaaaagcaatgccaacaattgtcactgccagccccaggtgagcagccaccatcccccaataactgaaggtggttttcgtgccgcgtgaaatacgcagcgcagcttccgcaattgccagcaccgcaatccagcaggccattgccaggccgagcaccgtcatcgccacaactttgctctcaaacagccacggcaacagcagagacagcaccagcgttgagatgaaggcgataatcaataaattgcggattttacgtgggcgatcgcgcccccagcgcaccagaggaccgacacccagcagtagcgcaaacggcaccatcagccaggtaaacatggtgttgaagaacggttcgccaatcgaaatactgcccagtcccagttgcttgtgcaccagcggcagcagcgtccccagcaacaccaccagcatcgcggcgaccagcaaaacgttgttcgctaacagcagagattcccgcgaccacagcgcattgtttacgcgtgagcgaactttgtgtccacgcgcggcaaacagcagcagcgaacctccaatcaccagcaccataaaggcgaggataaacataccgcgcgccggatcagacgcaaacgcgtgtaccgataccagcacgccggaacgcacgaggaaagtccccaacagacacaacgagaaggcactgattgccagcagtaatgtccacgctttgaagctggcgcgttgttcagtgaccgccagtgagtgcatcagcgcagtccccaccagccacggcataaacgaggcgttttctaccggatcccagaaccaccagcccccccagccgagttcgtaataggcccatgcggaaccgagcacaatgccgagcgtcaggaaaatccacgccgccagcgtccacgggcgagtaaaacgcgcataagtgctgtccagacgcccgctcagcaaagaagcaatggcaaaagcaaacgccaccgagaaacccacgtaccccatataaagcagaggcggatggaagatcagccccgggtcctgtaacagcgggttaagatcgcgcccttcaatcgggaagttcggcagcgtgcgtgagaatgggttagaggtaaagagaatgaacagcaaaaagccgacgctgaccatccccattatcgccagtacgcgggccacaatatccagcggaatacgctgactaaaaatcgccaccgcaaaggtccagccgctcatcagcagcacccacagcagtagcgagccttcatgcgcgccccaggtagccgccacgcgataccacaccggaagctgggtattggagtagctggcaacataggtgacggtaaagtcgttgaccacgaaagcattgaccagcaccagaaatgcgccagccacagacataaacagcagccaggcaaacaagcgggaagacgcgatcatgcgcgcatctccgcgcgccacgccccatagcggatacacggacagcagcagcgcaatccctaacgccagacacagcagcccgtttccaatttccggcatcatgatgctgggtccttataaacactcgccgggcgacggtggttagcttccatcgctttctcaacttctggcggcgtgtagttttcgtcgtgtttcgccagcacttctttcgcgaggatatgattgcctttttccagctcgccctgcaccacaacgccctgcccttcacggaacagatccggcaaaatgccttcgtaagagacatccactgagccttcagcatcgtaaatagtgaaggtcactttcagcgaattgggatcgcgctgcacactacccagcatcaccatcccgccaacgcgcagacgctgaccgacttccggcatttgctgagtttcacgcttgccgtagagaatttcccccggcgtataaaagagatcgatattcgagcgcagcgcatatagcaccagaccgatagtcagcgccagccctgccaacacggcacaggcaatccacaagcggtttttacggcgaatattcatgcagcctcctgctgttgcgcagcacgtaaacgcgcctcacgcgcccgctgttgcgccacaccacgcagaattgcgcgatgttgcatcaccgagtgcacgaccaaaaccaccagcggaataacggtcatcaccaccgccagccagacaaaaaaggcgtaaccgcccattgcgaaaaattcattccaggaagcaaatgcaggggtcatttacggcctcttttcagtatcagttcactcacccacggacggcgtttttccatcagcaaaatcaaattacgcatccgcatcagcgtcagcgtggcagacaggagcaggaagccaaaaatcgaccagcgcagcggcgaacgcatcgccggatcgatactttgctgcatccgcgttgatccctgatgcagggtgttccaccactccacggagtaatgaataatcggcagattcaccacgccaatcagcaccaggatacctgccgcacggcccgccagacggcggtcgtcgaaggcgtgccacagggcaatcacacccacatacaaaaacagcagcaccagttcagaagtcagacgtgcatcccatacccaccaggtgccccacatcggttttccccatgcagagccggtaaccagggcaataaaggtaaacacggcaccaatgggggccatcgccgccaccgccaggttggccattttcatctgccagacaaggccaataaacgctgccactgccattgatgcataaatgcccatcgaccagatcgccgcaggcacatgcaggtagataatgcggtagctatttccctgctgataatcagccggagcaaagccgaatccccagatccagccgacggtaagcacgaccacactggcaattgccagccacggtataaaccagccacagatttgatacagccgtggtgggatcgccagttgatgcagtgttttccacatagtttcgataccagactcgaacaaaaatcagtaatccagcgttattgaatgctgattcgtaacgctgccgccgtcgcaaaaggacttaatgtcgcggtgcctgccagcaacgcgcctaaaattgccagatacccgtcaacgggcaaatgcatggaagccgcgtccatcgcggcggtggcaaagatgagtaatgggatagtcagcggtaacaccagtatgctgagcagcacaccaccgcgcttaagtcccactgtcaacgccacacccggtgcaccgagaaagccaagcgtaggcgttcccagcagcagcgtcagcgccatcacttgccagccataaacatccattcccagtagcattgctaccagtggcgaaaggatgagtaacggcagaccggttaccatccagtgcgccatcaccttcgccagcacaacggcgggcaagggtaacggcaacaacatcaattgttcaagactgccgtcctgcaaatcgtcacggaacagtcgttccagcgccagcaaggatgaaagcagcgcagcaacccagataatgcccggtgcaatacgcgccagcagttgcggctccggaccgatactgagcggaaaaagggtaattacaatcaggaagaaccacagcgggttggcgatttcggcgctatggcgaaacgctacacgcagctcaagacggaaaatgcgccagaacatcatgcggccctcgtttgcgtcagtgaaatgcggcgaattttactttcagcaacgttgagcggctggtgggtagtcagaatcacaatccccccctgctccgtatgctgcgccatacgctgggtcagacgatcgacgccgttaacgtcaatcgcggtaaaaggctcgtcgaggatccataacgtggcacgggtcagccacagacgcgctaaagcgacgcggcgttgttgcccggcagaaagttgatttaccggaatatcgtcgaatccggcaagcccggcctgcgccagggcttccagacattgtgcggtatcgccatcgcgatgataaaagtgcagattttctaacgccgtcagccgggttttgatccccggctgatggcctatccataacaggttttgatggtagctgtcgcgtacctgatgcaagggctgcccttgccagagaacctcgcctgcgtcagggcgagacaaccccgtcagcaaacggagaagcgttgtcttccccgcgccgttgctaccggtgatttgtacccactctcctgcgttcagcgtaaatgacaagccactaaataaggttcgttcatcccgctcacaaagtaactctctggcttcaagcatacccacgcaataaccctgttaaaaacctggctcgacttcacgcatatcgggcagcttgtgcgctatccctttatggcaatcaatacaggtttgcccatctttcaccgcctggtcatgcatcttcgcggcaaccgatttctgggcggttgtatccatatactcgaagttgtgacagttacggcactcctgcgagttattgtccttcatgcgccgccactcattctgtgccattgtcagacgatgagcttcaaatttctgcggcgtgtcaataacgccaaaaattttaccatacagctctttacttgctttgagcttgcgtatcatcttcggcacaaactcgtgcggaacgtgacaatccggacaggtcgcacggacgccgctacggttgttgtagtgcacggaatccatgtattcctgatacaccgtgttacgcatttcgtggcagctaatgcagaactcttcggtattggctttttccattccggtgttaaagccgccccagaagacgatgccgccgacaaaaccgatcaacagcagcgttcccagcgccagacggctgggggtacgccaccatttccacaggcgcttaatcagaccaggcttacggtcagaatttcccataataacctcttatttcccgtaaccttttgatggggtaaaggtattccccacgattggcgcggtatcggcctgcggtacgtgacattgcagacagaaataacgacgcggagccacttccgcgcccactttgccgtcgctgtccataaagtgagtaggactgatacgcggcgcgccagtggtgcgatagctttcgacaccgtggcactgcaagcagcggttggtattggtcgttacctgataaccttcaacgctatgcgggatcattggcggctgattcacatagttcagcggcatccgatcctgctcttttggcatccgaatggccccttcctgcgtcccggatacttccggcgactggctaaaatcgacgccattagccgcccaaaccgcgccgcttaccaccagggccagcatcgccgtccattgacacagcgctttcttcaggtcatggcttttcatgatttcgctcccgaactccatcgtgtagttattgtaaatacatcctcagaacagacatccacgcagcgaccgcacgtcatgcaatcgcggctggtgacctgcaccgggctttgttcatccagcaccggggcacgtagcacatgcggttccgggcaaacatgaaaacaatccatacagcggttacatttctgccgatcgctggccgcaacggtaatcacacctttgctacccagcacgccatacagcgcgccaaccggacaaatgtgcccgcaccagccgtgttcaacgaccagtagatcaaataaaaacagcgcgagaataagcagcgcgccgctgccgaagcccattaccaggctacgccccatcagggaaacggggttgatccattcccagatgagcgtgccggttaaggctgatcccagcagaatgaccaccaacagcacgtagcgaatgtggcgagggatcgtcgcagactgattgaggtcaaagcgcctgcgtaaccagttcgctaagtcggtaatcgggttcagcgggcagacccagctgcaaaataatcgctttcctgccagggcgtagagcacagtgattatcaccgcaccggtcaacgccaccgtggcaggcagatgaccactggcaagactttgcagcgtcatcagcggatcggtcagcggaacggtgtcgaataacaggctacagctgtagttgccgtgtaagatccacacaccaaaccacggaccgctcaaaaacatccccagcacgaagaactgacaaaggcgacgtaacaccagccaacggtgactgcgccaccagccttttttcaccagcgcctcgcgcccggcgtcacgtttacgatttgccattgttcccctccagccagccgaagcggtaatggtgacctaactcccctttcgccagtgacagcggtaacaccttgattgccggttgttccagcacgcacactttttcgcacttaccgcagccggtacaggcgtcgctgtgaaccgtcggcagaaagcgggcgtgcttaccggtacgcgtgttgcgctccagctccagggtgatggcctcatcaattttcgggcattcgcgataacaaacatcgcagcgcagcccctgaaagttgagacagttttcctggtccaccagcaccgccagccccatccgcgcgtcgtcgatcgattcgatctcacgatccagcgcaccactcgggcacactttggcgcacggaatgtcctcacacatttcgcaaggaatatcccgtgcgacaaaatatggcgtgcccgccgacaggccagaagccagcgtcgccagttttaaggtgtcgtaagggcaagcctgaacacactgaccgcaacgcacacaggcactggcaaaggcgttctcgtttatggctccgggcgggcgcaaccgcacgccagatgcgcgtgcggtttgctgttgtaaccccagcgccacacccacggcagccagcccgcctgctgtgcgaacaacatcgcgcagaaagcggcggcgaccattttgaggtttcgctgaccgggacataatggcttacaccttctccagtttgactgcgcacttcttgaagtccgtctctttcgagagcggatcggtcgcgtccagcgttagtttgttaaccagctgtgcggcgtcgaagaacggcatgtacaccaggccctgtggcggacggttacgaccgcgcgtttcaacaatcgagatcacttcgccacggcgagaaaccactttcactttgtcgccacggcgcagatcgcgcgctttcgcatccagcgggtgaataaacaagaccgcttccgggaaggcgcggtgcagttccggcacacggcgagtcatactgccagtgtgccagtgctccagaacgcgtccggtagagagccacaggtcgtactcttcatccggtgcttccgccgccggttcgaacggcagcgcgaagatcaccgctttaccatccggtttaccgtagaacttatagccttcgcccgctttcacgtacgggtcgttaccttcgctgtaacgccactgcgtttctttaccgttcaccaccggccagcgcagaccgcgcgctttgtggtagtcatcgaacggcgcgagatcgtgaccgtgaccgcgaccaaaccatgcgtactcttcgaacagccctttttgcagatagaagcccagctcgcgggattcatcgttcagctgatcttccgccagttcggataccgggaatttgctcacttccggtgtggcataaagcacttcgtacagcgttttgccacgcagttccggtttcttcgctagcagctcttccggccacacttcttcagttttgaagcggcgggagaactggactaactgccagagatccgatttcgcttcgcccggtgcctgtacctgctgacgccagaactgagtacggcgttcggcgttaccgtaagcaccctctttctctacccacattgcggtcggcaggatcaagtcggcggccagcgcactgactgtcggatacggatcggagacgatgatgaagttgcgcggatcgcgccagcccggcatacgctcttcattgatgttcggcccggcctgcatgttgttggtacacatggtccagtaaacattcagtttgccgtctttcagcgcacggtcttgtgccaccgcgtgcagaccgattttcgccggaatggtgccgctcgggatattccacttcttctcgcagatatcacggtgtttctcgttggtcaccaccatgtccgcaggcagacggtgagcaaaggtgcccacttcacgcgcagtaccacacgcagaaggttgcccggtcagggagaacggaccgcaacccggctgggaaattttgccggtcagcaggtgcaggttgtagaccaggttgttagcccacacgccacgagtatgctggttgaagcccatcgtccagtaggagatgactttcttgttcggatcggcatacagctgcgccagttgttctaactggtctttcggcacgccggtcatttcagcggttttttccagcgtatactcggcaacgaaggctttgtaatcttcaaagctcatcggttcggaggcgtcagaacctggattcttcgctgctttttccagcggatgggtcggacgtaaaccgtagccgatgtccgtcgcccctttgcgcaggttaacgtgtttgctgaagaagtcctgatttatcgcattgttttgaatgatatagttggcgatgtagttcaggatcaccaggtcagactgtggcgtaaagatgatgccgttatccgccagctcgaagctacgatgctggtaggtagaaagcaccgccacggtgacgttctgattagagagacgacggttagtgatgcgcgaccagaggatcgggtgcatctccgccatgtttgcgccccacagcacaaacgcgtcagcctgctcgatgtcgtcatagcagcccatcggctcatccataccaaaggtacgcataaagccaactactgccgacgccatacagtgacgcgcgttcgggtcgatgttgttcgaacggaagcccgctttaaacagcttggacgcggcataaccttcccagatagtccactgaccagaaccgaacataccgatcgattccggccctttttctttcagggcggttttgaatttctcttccatcacatcgaaggcctgatcccaggtgattggggtaaattcgccttctttgtcatatttaccgtttttcatacgcagcagcggctgcgtcaaacggtctttaccgtacatgatcttgggcaggaaatagcccttaatgcagttcaggccacggttaaccggtgcgtccgggtcgccctgacaggccaccacacgcccctgctgcgttccgaccagaacgccgcaaccagtaccgcagaaacggcacggcgctttatcccatttaatggcttcctgctgaccaacaacggcgcgggcaacgcccggcacgctgagaccggcagccgccgcagcggccgcaacggcgttagctttcataaagctacgacgactgagtttcatggtgtttcctcaccttgctcttcctgctggtgataaaccagcgacaccgccagcacgccctctacgttgcgtactgactcaatggtttggatcagcgtttcgctgtcttctgcttccaccaccacaatcaactgaccgctcggcgcgtcgctgacagcaacttcacagccgggaaaggcgttcagttgggtgctgatgtctgaaattcgttcgcttttggcctgcacgaccaggctgcaaacttgccagttagtgtgcatggagatactccgcagttatggctgataccggacagctggctgcacatgctccacatccgttgcaaagttggctattaagttgcggctggtagatcccggagagcgtcgggcgaaagataattgccattggctcacagctatcctgacagcggcggcattcaactgactgatacgccaggcacgcgtccccaatggtgaactgcaaatcccaggccctggtgtggcgcggagaaaatagcgattcggggcaagcctgcgcgcaggcgtaacagaagctgcactcgttatttttgaaattaacgctcggatagccgcccgcgccgcgttgcagaatgttgttttcacaagcattaatacaggcgtcgcaacgggtgcaatgggtcagaaaatgagattcatcaccggaccagggcggacggataccgttactggctttgcgccagcgaccagtgagtatgccccgacgggatgcatcaatcttcacattgaccttccatcattaacgcgctctgaaaattgagagcgaccaaataaaccgcataattaataagccatttttatagccgctaagatattaaaggatgtgtcaaagatgcataccccgatcggggtaaaacctgtagcaggatcaaaagagtggcgggaagcgtggcaaaaacgggcttttgctcacatttcaaatggttataaacatatttatatagcgattaattcaccagagatatttctgctggtttgctccctcatcagaatttaacactaaaagagcaggtaaaattgtctgaatgttctttaagttattcataaagcaaattaataaatctgatgaatatgttaaccttcagcgacatcatcggtgaaaacctataaatgaagaaggaaagcaaaaaaatgaagaccattctacctgcagtattgtttgccgctttcgccaccacttccgcctgggcggcagaaagcgtccagccactggaaaaaatcgcgccttatccacaagctgaaaaagggatgaagcgtcaggtgattcagttaaccccgcaagaagatgaatctaccctgaaagtagaactgttaaccggtcagacgctggaagtcgattgcaatttgcatcgtctcggcgggaagctggaaaacaaaacgctggaaggctggggctatgattattatgtctttgataaagttagctcgccggtttccacgatgatggcctgcccggatggcaagaaagagaagaaatttgtcaccgcgtatctgggcgatgctggaatgctgcgttacaacagcaagctgccgatcgtggtgtatacgccagacaatgtagatgtgaagtaccgcgtctggaaggcggaagagaaaattgacaacgcggtagttcgctaaactgctgtgaagtgcgtcaccccgtaggtcggataaggcggtcacgccgcatccgacatctaacgcccaagccggttgcctgatgcgacgctggcgcgtcttatcaggcctacaccgctgtgaagtgctccaccccgtaggttggataaggcggttacgccgcatccgacatctaacgcccgagccggttgcctgatgcgacgctgacgcgtcttatcaggcctacaccgctgtgaagtgctccaccccgtaggtcggataaggcggttacgccacatccggcataccatgccggatgtggcacatcattacaacgcaatatccgccacttctttttgaacgggttgcggtttcaactgcggtttcggcgtactatctgctgcctgcggcttgtcgtatttcaggcccagcacttcgctggtgtactgcaactcgcgttctgttgccgctacatcaccgttcagcttgcgtccataagatggaacgatcgctttcaacgtagcctgccattgcgggctggaaacgcgatcgccaaatactttttccagcagatccaacataatcggcgcagcggttgacgcccctggcgatgcccccagcagcgcggcaatggtcccttgctggtcactgaccacttcagtacccagacgcagtacaccacctttatcggcatcacgcttgataatctgcacacgctgccccgcttgccacaaacgccagtcctcttttttcgcctgcggatagtactctttcaacgcttcaaaacgatcctcttcactcaacatcacctgactcaccaagtatttcaccagatcgaaattatccagcccgacgtgcatcatcggcatcacgttagaggtggtggtggaactcatcagatcccacaatgaaccgtttttgaggaatttggttgagaaggtggcaaatggcccaaacagcactacgcgtttaccgtccagaacgcgggtatcgatatgcggaaccgacatcggtggtgcgccaacggatgctttaccgtaaaccttcgccagatggtgattaaccacgtccgggttttccgaaacaaggaactgtccgcccaccgggaaaccggcgtagtctttcgcttccggaatccccgattcctgtaacagcttcagcgccgcaccgcccgcgccgataaagacaaatttggcacgaatgttctgtgcagtgccatttttcagatcggcaacggtaacggtccaggtgttatcgtcattacgctttagggcgcggacttcgctgctgagttgcagcgagaagttagatttcttctgcaaggaagcaattaactggcgggtgatctcgccgtagttcacatcggtaccaatttccgtacgcgtggctgccactttctgttgcggatcgcgcccttccatcactaacggtgcccactctttgatctgcgcgtgatcttcagagtaacgcataccgcgaaacagcgagctttgttgcaacgcggcgtaacgggcgcgcaggaaattaacgttatcctcgccccagacaaagctcatatgcggaacggtattgataaatgaacgcggagtacgcagcacgccgcgctcgacctggtgcgcccagaactggcgggaaatctgaaatgcttcgttaatggcgactgctttttcaatactgatactgccatcggcgttttgcggggtgtagttcagttccatcagtgcagaatgcccggttccggcgttgttccagccgttcgaactctcctgcgcgacaccctccaggcgctccaccatggtcatcgaccattcaggctccagctcgcgtaaataggtccccaacgtggcgctcataatgccgccgccaatcaacagtacatcagtttcctgctcctcggacgctttcgcttttgccgccatcgaaacggcattaagccccacggccatcgagaagagcatggcagtcacttttttcatcttgttaatgccttacttttagtcgctttattgcaggtgagatttgcgcggcatcaacggtaacactaaagtaacaacatttaaataatgtttataaattatattctaattttagaaacattataatttcgttgattaattatagggttattagaaatgaagggatttttagaatattgacctggcggcagcagtccgccaggtcagcgtcgtaatattatgccgtccgggcaacggcatcacgcgaagcggcatcgcgctcttcgcccgtcagctcgctaagttgcccattgcgcatttccagcaggcggtcggcgtggataaagtaatgatcatcatgactgatggcgaaaatagttttacccatctcctgcatcagcggcagcaacacctgataaaactcacgacggaagtgtggatcctgatccgccgcccattcatccagcaggataatatcgcgttcttctgccagcgccagcaacagcgccacgcgttttttctgcccttttgataacttcaggttaacaatacgcccgttgcttaactcaagcttatgagccattttcagctgcgccagccacttctcaaccagttgcgggttagcgggttgcccctccggccccagcagttgatcaaacagccagacatcggtaaacactgccgaaaacagtttgcgataatcttccggttgttcgccgctgacaggtttgccatccagcaagatttcgccgctttgtggctggtacaagcccgtcagcaacatcgccagcgtcgattttccactaccgttgccaccaatcagaaacagcagctcgccacgtttaatggtgaggttaatcggcccaacggaaaacgcgttatcctgatagctaaacgtcacattacgcagctccagcgtttgccagttgggaaacgcctgcgggcgcggaaactctgctttgaaaggcgcgagcgcgaatttgttcagcttgttaaacgccacctgcgccgtcagcagcgtcggcaatgcgccaaccgccgaaagcagcggcgtacgcaggaataacagcgtcaacgaataggtcgcagcaacgttggtatcagcccaaccgaggctgttcgccatccagaacaccaggccgatagcgcccagcatcatgatgtttgaccagttcacggcactaagatggaaggtgtctgcgcggataatatgatggcgatactcttgcgcatcaggaatgtagaggttgttaaacacatactcggcgcgttcacggttcagagtcagctctttgcgcccttcgagtacggtttgaaaatccgtgtacagcttatcttcggtttcacgcagggtcgccatatgtttgtacacccgcgccaccagcacaaaaccgccccagatggtgaccgccatccagatagccgttaccagcaacattttgcccgacagcatccacagatacgccgctgaaccgatagtgagaatgatcccctgcaccagttccggcagacgcacaaaagcaatggtgatattgcgcacatcgctggttaatcccgccagcaacgaggcgctaccgagttgttcaatgcgctcgacgtgggtatcgagaatccgcttgataaattcactacgcagtcggtaaacgaagtgatgccccaaagtggtgagcgccagttgcgatccgagagtgattgccatcaacagcagcaataatcccagaaactccggcaacaccagcagactggtatccgccgtttcgataaggcgctgattgataaaagcaattaagccaatgcctaaagccgcactggcgaggcttagcgccatcacactgataaatggccagcgatactgccgccagacaagtacaagaagttccatgcagaaaacccggacaatgaattacagcccgcagtttaaacatcttcgcgcgcacagcaataataattcttatttttattcttttttacctgcctgacggaatgtcaggttgtaacggcagtcgccggtgagtggatgaaaccccgctttcagcggttgaatgccgtgataaaacagccgcgattcaccgccccataccaccacatcgccatgttccaacaacaaacgtttgagcggatcattacgtttcaggccaccaaattgaaaaatcgcgggtaagccaagagaaacagaaacaatcggcgcgcgcagatccggttcgtctttatcctgatgcagcgacagtttcgcgccaggagcgtagcggttgataagacaagcatctggctggaaatctggatagcccgccgccgtagccgcacgttgacataaatcatgaaagctttgtggcatggcgggccacggtttatttgtttgcggatcaatgggcgaatagagataaccttgccgatgggtcgtccagcccagatgcccacagttggtcatcgccaccgacatggtatatcccccgggggtgaccatctggcgaaacggcgactggctggcaacgtcattaatatcgcggatcagttgctccgcagcgttaaaagcaaaacgccgtaaaattaccgcaccagccgccagtggctcttgccacggttcagcatcggcaaacagatccaacattacctctcctcattttcagcttcgcggcgcagcagttgcgctttacgcgacacgccccagcggtaaccggaaagtgtgccatcaccacggaccactcgatgacagggtattacgatagccagcttgttggcggcacaggcgctggcaacggcccgtaccgctttcggtttgccgatggcgttagccagttgctgataactgacggtttcaccacaaggtatcgtgcgcagtgcctgccagacttgttgctgaaaagcagtgccgcgaatgtccagcggtaacgtcagcggcgtatcgcgttgattgaggctggcgatcacttcacgcacatgttgctgaaacgtcagatcggcaggcgcgttgtcggcagcgggaaacatctgctgcaactcgctgattaatgtcgcgtcatcatcgcccagcaatatcgcgcaaatcccccgctcgctttctgccaccaggcaacgacccagctcacaatcagccagcgcgtaacgcaccgccagattttcgccaccgtgacggaattgtttagccgtcatgcccagcgtttcatcggctttgcggtagtaactgctgctgtcggggaatccggcgttaagaatagacgtcgtcacgctctcccctttcgccagcgattcgcgcaaacggcgagcgcgccaggcctgttgccaggctttaggcgtcattccggtagtcgctttaaacaaccgatgtagatgaaatggactcatcgccacctggtcggctaaggcttccagcgttacaggcgtttcctgttccagcagtcgacacgcgtgggtgattttatccaaccgatgttgccggggattggctttgtctggctgacaacgtttgcaggggcgaaatccggcggcgagtgcctcgctggcatttgcgtagaaggagacattttcccgcaaggcatgtctggcgcggcaagacggacggcaaaagatacccgtggtgcgcacggcgaaaacgaattcgccgtcggcattcgggtcgcgggctaagacagattgccagcgttgatcgtcagttaagcatgtggcgtttttcataatcagctccctggttaaggatagcctttagtctgcccggtcaccatcacgcaaaaaccaacaatcttgcgctttaatttttttcgctgataaggaagcttttaaactgtggtgacatccaggttttaaagctatcgccttctttggtgatcatataaaccgccagcccttcccggcgaacaacctctttggctttctccggcccgagtaccatcaagccagtatcccaggcatcggcttccagcgccgtcggagcaatcaccgtcacggataccagattgtgttcgatgggacgcccggtttgcggatcgataacatgggaaagacgtttgccgtccagttcgtaatagttacggtagctgccagaggtgctaatcccatgaccgttgatatccaccacagcctgaaccgcgttttctttatcggttggtttttgaatcgctacccgccacggcaggccttcaccgttcataccacggctgttcagcgcgccgcccaccgacaccagatagcgggaaatcccttcctgctccatcaagcgtgccaggtgatccgccgcataaccttcaccgacggtggagagatcgacatttaaatccggcaggtctttttgcagatattgctgatgcgactgattaatgaccgtcaggtgctgtaagccggttttggctttcatcgcatcgatctgttcctggctcggaatttgaaccgactgttgttccgggccaaagccccacagattcaccagcggcccgacggttatatccatcgcgccatcggtcttcgtgccaatgcgcagcgaggtggtgacgatatcggccatcgcttcacttaccggccacggcgataaactttgcgaatcgttaaagcgcatcagcgcggaatcttttttataggtcgaaagcagctgatcgtcggcgtccagctgggtctgaatcttttctttaagttcggcactgcgtttggcatcaatgcccgggatgctggcacgccagaaggtacccatggttttgccttctagaacggtaacttcagtagcgtgggttttggcgggttgtggtttttgatcgcaaccaacaaagaagagcgcggcagccagcagtgccacgcgggtaaagcttatttccatacgtgattatcctcatgcgaacggtcgcaagagtacaccaaaaaaatgagtttgtacgctgaaaacaatgaaaaaagggcccgcaggccctttgttcgatatcaatcgagattagaactggtaaaccagacccagagctacgatgttatcagtgttgatgccagcgtcacgagtgaactggttgtcgtccagcaggttgattttgtagtcaacgtaggtggacatgtttttgttgaagtagtaggtagcaccaacatcaacatatttcaggatatcttcgtcgtcgtagttacgaccagcgatggtacccaggtttttacctttagactgcaggtatgctacagacggacgcagaccgaagtcgaactggtactgagcaacagcttcaaagttctgtgctttgttcgcccaacccagggaacctacgcgagttgcgttataggtctgggtgtactgagcagccaggtagatgttgttagcgtcgtatttcagaccaccggtgtaggtttcagcacggtcgccgttaccgatgtacagcgggctgttctgatcatcagtacgtttggagctggagatcgcaccaccgataccgaagccttcgtaatcataagtgatagatccgccaacgccgtcgccgttctgacgcagagcaccacgaccgttgttggtcatgccttcgccgcttacgctaccgtttttaccctggtactgaacagcaaagttcaggccgtcaaccagaccgaagaagtcagtgttacggtaggtcgcgaagccgttaccacgctgctgcatgaagttgtcagaaccgtaggtgtcgccaccgaattctggcagtacgtcggtccaagaagttacgtcgtaaacaacgccgtagttacgaccgtagtcgaaagaacccacatcctggaatttcagacctgcgaatgccacacgggtccaggagttttctttgttgtcttcagaggtattgccctggatctgatattcccactggccgtaaccggtcagctggtcagtaacctgagttacgcctttgaaaccaagacgtacataggtctggtcgccgtcttctgacttgttgtcagagaaatagtgcaggccgtctactttaccgtacagatctaatttgttgccgtctttgttgtaaacttcagcagcgtttgctgcgcctgctaccagcagagctgggaccaggagggacagtactttaactttcatgttattaaccctctgttatatgcctttatttgcttttttatgccactgcatactgattaaccctcattaatcagtcggcaagtccattctccccaaaaatgcagaataatccaacacaaatatgatactaaaacttttaagatgtttcatttatcgctatagatgtttcaaaatgtaaatgcaagggaactttttaagattattgcggaatggcgaaataagcacctaacatcaagcaggtaatgactccaacttattgatagtgttttatgttcagataatgcccgatgactttgtcatgcagctccaccgattttgagaacgacagcgacttccgtcccagccgtgccaggtgctgcctcagattcaggttatgccgctcaattcgctgcgtatatcgcttgctgattacgtgcagctttcccttcaggcgggattcatacagcggccagccatccgtcatccatatcaccacgtcaaagggtgacagcaggctcataagacgccccagcgtcgccatagtgcgttcaccgaatacgtgcgcaacaaccgtcttccggagactgtcatacgcgtaaaacagccagcgctggcgcgatttagccccgacatagccccactgttcgtccatttccgcgcagacgatgacgtcactgcccggctgtatgcgcgaggttaccgactgcggcctgagttttttaagtgacgtaaaatcgtgttgaggccaacgcccataatgcgtgcagttgcccggcatccaacgccattcatggccatatcaatgattttctggtgcgtaccgggttgagaagcggtgtaagtgaactgcagttgccatgttttacggcagtgagagcagagatagcgctgatgtccggcagtgcttttgccgttacgcaccaccccgtcagtagctgaacaggagggacagctgatagaaacagaagccactggagcacctcaaaaacaccatcatacactaaatcagtaagttggcagcatcacccatcaagcaataataattcaaggttaaaatcaataacttattcttaagtatttgacagcactgaatgtcaaaacaaaaccttcactcgcaactagaatatctcccgctatcatcattaactttatttattaccgtcattcatttctgaatgtctgtttacccctatttcaaccggatgcctcgcatccggttttttttacccttctttacacactttcattattctgtgctaccacagaaaaactataactcttgtcaactatttcacaaataattaacatcagcataatttccagcaatcttcgtttatttgcaattaatttcgttgggctttttgtaggttatttgtacagcaaaatggcgcttgtacatctatttcccccaatgcaggatgataaatatcacgggagaatagagaatcatcaatcaggtaagagtctggaatttcacactgtaccctttatactgccctatcacttcgcgaagttttaacaggtcataaacacgaatgcgtcagaaagagacaacggccacgacccgcttttcactcctaccggggagcattacccgcttctttttactgttgatcattgtgttactggtgacgatgggggtaatggtacaaagcgccgttaacgcctggctgaaagataaaagttaccagattgtcgacattacccacgcaatccaaaagcgcgtcgatacctggcgttacgtgacctggcagatctacgacaacattgccgcgacgacctccccctcctccggcgaaggtttacaagagacgcgcctgaaacaggatgtctactatctggagaaaccacgccgcaaaacggaagcgttaatctttggctctcacgacaactcaacgcttgagatgactcagcggatgtccacttatctggatacattgtggggtgcagaaaatgtaccgtggtcgatgtattacctgaatggtcaggataacagtctggtactgatctcaaccctgcccctcaaagatctcacctccggatttaaagaatcgaccgtcagtgacattgttgattcacgtcgtgcagaaatgttgcaacaggccaacgccctcgatgaacgcgaaagtttttctaacatgcgccgcctggcctggcagaacggtcattactttaccttgcgtaccacgttcaaccagccgggacatctggcaacggtcgtggcttttgatctgccgattaatgatttgatcccaccgggtatgccgctggacagtttccgccttgagccagacacgacggcaacgggagacaatgataatgagaaagaaggaacggatagcgtcagtatccactttaacagtacgaagattgaaatctcctcggcactcaactctaccgatatgcgcctggtctggcaggttccttatggcaccttattgctggatacgttgcaaaacattctgctgccactgctgctgaacatcggtttgctggcgctggcgttatttggctataccacattccgccatttctccagtcgcagtacagaaagtctacccaacacggcggtcaataacgaattgcgcattttacgggcaatcaatgaagagatagtctcactgctgccgctcggcctgctggttcacgatcaggaatcgaaccgcactgtcataagtaacaaaattgccgatcatttgctgccgcatttgaatctgcaaaacatcaccaccatggcggaacagcatcaggggattattcaggcgacgatcaataacgagctgtatgagatccgcatgttccgcagccaggtcgcgccgcgcacacaaattttcattattcgcgatcaggatcgcgaagtgctggtaaacaagaaactcaagcaggcgcagcgtctgtatgagaaaaaccagcagggccggatgacctttatgaaaaacattggcgatgcgctgaaagaacctgcacagtccctggcggagagcgcggctaaactcaacgccccggaaagcaaacaactggcgaatcaggcagatgtgctggtgcggctggtcgatgaaatacagttagcgaacatgcttgcggacgatagctggaaaagtgagacggtgctgttctccgtgcaggatttaattgatgaagttgtgccttcagtgttgcctgccatcaagcgtaaaggtctgcaactgctgattaacaatcatctgaaagcacacgatatgcgccgcggcgatcgcgatgccttacgacgtattttgctgctactgatgcaatatgccgtgacctcaacgcaattgggaaaaatcacccttgaggttgatcaggatgagtcctctgaagaccgcctgacattccgcattctggacaccggagaaggcgtaagtattcatgaaatggataatttgcacttcccgtttatcaaccagacccaaaacgatcgttatggaaaggcggacccgctggcattctggctgagcgatcaactggcacgtaaactgggcggtcatttaaacatcaaaacgcgggatgggcttggtacacgctactctgtgcatatcaaaatgctcgccgctggcccggaagttgaagaggaagaagagcgtttactggatgatgtctgcgtaatggtggatgttacttcggcagaaattcggaatattgtcactcgccagttagaaaattggggtgcaacctgtatcacacccgatgaaagattaattagtcaagattatgatatctttttaacggataatccgtctaatcttactgcctctggcttgcttttaagcgatgatgagtctggcgtacgggaaattgggcctggtcaattgtgcgtcaacttcaatatgagcaacgctatgcaggaagcggtcttacaattaattgaagtgcaactggcgcaggaagaggtgacagaatcgcctctgggcggagatgaaaatgcgcaactccatgccagcggctattatgcgctctttgtagacacagtaccggatgatgttaagaggctgtatactgaagcagcaaccagtgactttgctgcgttagcccaaacggctcatcgtcttaaaggcgtatttgccatgctaaatctggtacccggcaagcagttatgtgaaacgctggaacatctgattcgtgagaaggatgttccaggaatagaaaaatacatcagcgacattgacagttatgtcaagagcttgctgtagcaaggtagcctattacatgaacaatatgaacgtaattattgccgatgaccatccgatagtcttgttcggtattcgcaaatcacttgagcaaattgagtgggtgaatgttgtcggcgaatttgaagactctacagcactgatcaacaacctgccgaaactggatgcgcatgtgttgattaccgatctctccatgcctggcgataagtacggcgatggcattaccttaatcaagtacatcaagcgccatttcccaagcctgtcgatcattgttctgactatgaacaacaacccggcgattcttagtgcggtattggatctggatatcgaagggatcgtgctgaaacaaggtgcaccgaccgatctgccgaaagctctcgccgcgctgcagaaagggaagaaatttaccccggaaagcgtttctcgcctgttggaaaaaatcagtgctggtggttacggtgacaagcgtctctcgccaaaagagagtgaagttctgcgcctgtttgcggaaggcttcctggtgaccgagatcgctaaaaagctgaaccgcagtattaaaaccatcagtagccagaagaaatctgcgatgatgaagctgggtgtcgagaacgatatcgccctgctgaattatctctcttcagtgacgttaagtccggcagataaagactaatcacctgtaggccagataagacgcgttagtgtcttatctggcatttgcaccgattgccgaatgcggcgtaaacgccttatgcgtcctacgattcccattatttcaacagattacatcaaagtaggccagataagacgcgtcagcgtcgcatctggcatttgcactgaatgccagatgcggcataaacaccttatccgtcctacgattcccgcgatttcctgaccctctcggcatataccgtcagcgtctgttttatcacatccagcgttaccggcttcgacaggcagctgtccataccggactccagacaccgctgcttctcttcagccaacgcattagcagttactccgattaccggcaacgtcagtcccaactgacgaatgcgttgcgtcaagcggtaaccatccatatttggcatgttgacgtcgctaagcacgatatcaatatgattcttgctaagtacattaagcgcatcgacaccatcattcgcggttttacattgatagcccaacgatcccaactgatctgccagcagacgtcggttaatcggatgatcatccacgaccagaatcatcatatcgtcattatcgctgaccgctttgtccgtcgacggcagagcgttagcaggatcgtcgctctccatctcgatcaaataaatacgcgccaacaatgccggtagctcatgcggggcagccacactgtgtacccactcccctggcgctttctccagcggaataccaatatggcgacgacagaaggtcactaccgctctaccctgccattttttactcactacctcgtcagtaattaacacatcttcgggagtcggttcctgcccttcgtatgttgtaacgacgatgccgctgcgctgcaaactggtttccaggaactgacagagcgacgcattgcggaccgccagccagcagcgtttaccactcaacccttccacgccttttttctgcgggtactgagcgccgtacaacggaatacgcacggtaaactggctgcccattcccggttctgaatctaccgagatatcgccgtccatcatgctgatcagtttttcacaaatcgccagacccagaccggtcccctggaagtttcgctgtacgcccgttccgacctggaagaagggatcaaacaagcgcaccacttctttcgccggaatccccacgccggtatcgcgaacacggatagagagataatcgccatcagcgcggacatgcaaaactatacagccggtatcggtgaattttatggcgttactcaacaggttggagatgacctgctgtaaacgcatcgggtcgccatttaaggccactggcacatccggttcaataaagcagtacaagcctaactgcttgcgtaccaccagcggtaaatagttggcggtgatgtggttcatcacttcacgcggtgaaaactcacgcggttcgatcttcaactgttccgattcaatcttcgagaaatcgagaatatcgctgataattttcaacaacaggctggaagagttgttcattgccgtcaccagccgatcgacgcctttcggtaactctttggtttgcaacagatccaggttaccgataatgccatacagcggcgttcgcagctcatgactgacggtggcaaggaacatcgattttgactggctcgcctgttccgctgcttgtgccatctcctgcaacgactcttccatcttcacgcgcgaagaaacatccaccagcacacaaatggccacgttttcattacgatagcgcgaatggacgaagctgatttgcagattggtattgttgctggtcaggacatcaacaaaattgacctgctgcccacagataatttgcgtcagtcgttggcggtcctcatgcgtaagcatattgagataggtatgcgccagttcgttacttaaaatattgacgccatcagcggtacgcaaaatgcagatacccactggcgcggaggcgacaatcttgcgattgaactgctcatgttcttccagtcgcagggcgtcgctttccgccggaatgaaaatacgtcgctcgtacatccgtgcgagagtaaacaatgcagctccggcaagcacattcagcaaaattgcgttaaggatcaacatgcgaatgcgttccagcaccttatcaaccggcaccgaatacacgatgcttagcgatgagggtggcagatttttcttcagcaccagctcccggaacccttccgtatagccaaaccaggagcgttcctgcatccagcgaggatcgcccttaattttactttctggtccggtaagcgaaatcagggtatgaccattttcatcaagaatggtaacccccatcggcaacgtacccggtaagaaaaagttctccatccggatggtctgctcgacacccaaaagcgcctgcaaccggttcgccagataaactggcgtcaacgcgtaaaaatacccgacgccagggcgcggaccttcgctgatccagtagaggttactgccgctatcatcttgtggtgcatttcgatatttattgatgcgttcatgcaaagctttcaacgcggtatcgcgttccactggcatatcacgcagaccgaaattggccatgcagaggttatcgctgccgattaaaaatacccggtttagatcgtaagccgcagaaaaattatcgcgccagtagcgcataaaccacgccaatgactccagagaacctcgccaggtgttactcattgcggaacaatcggagtcggcaaacagcggttcaaacgcaggcacatccgcctgcgtttctcgtccacgcggggaaagcacaccgttttctgccgataagcgattttcggcgatgtacttcagctctttcatcacatcagaggtgcgttgaataaagcgctgagcctgatcggaactcagattaaattcctgacgaatttccgattctcgctgatgtaacgcattaacgatgtaaaaaacggatgaaaaagcaatcaacagccagagcactaacgccaatgctctgaacatgtagcgcgaggctttcagggttgtacgaaaagaagcaaggtatttcaaaggggcgaagctccgcctcaggtgaccgatggagtgtggttaaggtagcggtaaaagcgtgttaccgcaatgttctctcttctctggaatatgatacaccgccgagaaatcatcaccttaacctctgataatcgtcatataccggacaagactagtggatttcagcatgcattatatgaagtggatttatccacgccgcttacgcaatcaaatgatcctgatggcaatcctgatggtcattgtcccaacgcttactattggttatatcgtagaaacggaaggacgttcagcagtcttatctgaaaaagagaaaaaactttctgccgtggtcaacctgcttaatcaggcactaggcgatcgctatgatctctacatcgacttaccacgtgaggagcgtatccgcgcattaaatgcagaacttgcccccattaccgaaaatatcactcacgccttccctggcataggtgctggttattacaacaaaatgctggatgcgataatcacctacgcgccttcagcgctatatcagaataatgtcggcgttaccattgccgcagatcaccctggtcgcgaagtcatgcgtacaaatacccctttggtttattcaggcaggcaggtgcgcggcgatattttgaattcaatgctccccattgagcgtaatggtgaaatcctcggctatatctgggccaatgaattaaccgaagatattcgccgccaggcctggaaaatggatgtgaggattatcattgtgctcaccgccgatttgctgataagcctgctattgattgtccttttctcccgtcgcctgagcgccaatattgatatcatcaccgatggcctctcgactctggcacaaaatattcccactcgattaccacaattgcccggtgaaatggggcaaatcagtcagagtgttaataacctcgcccaggcactgcgtgaaacgcggacacttaacgatctgattattgaaaacgctgccgatggcgtcattgccattgaccgccagggtgatgtaaccaccatgaacccagcagcagaagttatcactggctatcaacgccatgaactggtagggcagccttactccatgttgttcgacaatactcagttctacagtccagtactggatacgctggaacatggcaccgaacatgtggcgctggagatcagttttccaggtcgtgaccgcaccattgaactcagtgtcactaccagtcgtattcataacacgcacggtgaaatgataggtgctttggtgattttctctgatttaactgcccgcaaagaaacccagcgccgcatggcgcaagcagaacgcctcgccacactgggtgagctgatggctggcgtcgcgcatgaagtacgtaatccgttaacggctattcgtggttatgtacagatcttgcgccaacaaaccagtgacccaatacatcaggaatatctgtccgtagtactcaaagaaatcgattcaattaacaaagttattcagcaattgctcgaattttcacgtccacgccacagtcaatggcaacaagtcagcctcaatgcattggttgaagaaactctggtactggtacaaaccgccggcgtacaagcgcgggtcgacttcataagcgaactggataatgaattaagcccgattaacgccgatcgtgaactgctcaaacaggtactactgaatatcctgatcaatgccgtccaggctatcagcgcacgagggaaaattcgcattcaaacctggcaatacagcgactcacaacaggccatttcgatagaggacaacggctgtggcattgatctctcgctgcaaaaaaagatcttcgatccctttttcaccaccaaagcctcaggaaccgggcttggtctggcgttaagtcaacgcatcattaatgcccatcagggtgatattcgcgtcgccagtttgccgggctacggcgcaaccttcacgctgatatgactttccgtgtcaaaccggaatctctaattttgacgattttctttttaggtttaattccctgagggcgacgtagcagtaaatccgacggtgaatcacgctgatattcgcgggttggataccgcattacagaggtccgtcatatgagcctgccactttcttacgtcgcgaatcagctttgttccgccgtcgccaagcgctaacgtgggttactcttgtaccgggctacgtcgccttcagggaactggttattctcattttttatttgtgacattgtggttgttgtgcgacagacattgctattcggcccatatcccagataaaacccgccagctcacgtgcaacagcaacaattgtaatattgacattctttcctttggcctgaagttttcgatacctcttacaaagcctgagttgagcatcccatgctctgtcaatgacggggcggggtaaattttcctgccttttttgtattgccggactgatgcgtgccggatgacggtaactccacgctgcctcgaccaatagctttctggcatagctgtttccggctttggtaatgctgccctgatgtctgcttccacccgatgaatattctgatggcgtgataccaaaccatgacatcagttgtcgtggatgttcaaaacgggtcagatcacccagttcagaaattaatccaaccgcagtaataaactgaatccctcgcatggcttgcagcgcctctactaccggatacagcctccattcggtaacggcctccttcagggcggattccagccgttcacattgtgcctgccggtcttctattgtacgacggtgttcgtcaaaagctaattgtcgccagggactttcgaatgagtatttgctgagccagcgtcggtgtgcagggccccaatctgctcgcccgacataatggaccccatgaaccagaagaaacgatttcagacgttgccttgcatgccgtaaatcatcgcgggcagatgcccatgcccgggccaaatcccggaatgcctcatcttcaatgccgggtacgtagacagcagaaagatctcctgcacgcagtgaacgcacaagtctgatggcatcacggcgatcggttttaacccgctcccccggttttttcgggataagtgagggggcgcagaccatgcagtcaaaaccggatttcaccagccgacgataaagtccataaccacagggccccgcttcataaacgatactgacctgcgatgactttgacctgagacgtttacaaagattctgaatatcagtaggtgatgtgccaattttacccatcagttcaacaggttctgaattgatagcataagcgacagtaatcgattctttgtgaacatctaacccgacgtacaatgtgttattgttgttcatgctggcctccgtggtggaaataccggggtgtagcaacagctcacccatgcggctctgacaacgatgttaacccacgttaaatatcccacgttggccagcatctgtctcacggaaagtcatactgccttattttaccgatcaacccgcagggaaatcagactgtatgactgctattaatcgcatccttattgtggatgatgaagataatgttcgccgtatgctgagcaccgcttttgcactacaaggattcgaaacacattgtgcgaacaacggacgcacagcattacacctgtttgccgatattcaccctgatgtggtgttgatggatatccgcatgccagagatggacggcatcaaggcactaaaggagatgcgcagccatgagacccggacacccgttattctgatgacggcctatgcggaagtggaaaccgccgtcgaagcgctacgctgcggagccttcgactatgttattaaaccgtttgatctcgatgagttgaatttaatcgttcagcgcgctttacaactccagtcaatgaaaaaagagatccgtcatctgcaccaggcactgagcgccagctggcaatgggggcacattctcaccaacagcccggcgatgatggacatctgcaaagacaccgccaaaattgccctttctcaggccagcgtcttgattagcggtgaaagcggcaccgggaaagagttgattgccagagcgattcactacaattcgcggcgggcaaaggggccgttcattaaagtcaactgcgcggcgctgccggaatcgttgctcgaaagtgaactgtttggtcatgaaaaaggtgcatttactggtgcacaaaccttgcgtcagggattatttgaacgagccaacgaaggtactctgctcctcgacgaaattggcgaaatgccgctggtactacaagccaaattactacgcattctacaggaacgggaatttgaacggattggcggccatcagaccataaaagttgatatccgcatcattgctgccaccaaccgtgacttgcaggcaatggtaaaagaaggcaccttccgtgaagatctcttttatcgccttaacgttattcatttaatactgccgcctctgcgcgatcgccgggaagatatttccctgttagctaatcactttttgcaaaaattcagtagtgagaatcagcgcgatattatcgacatcgatccgatggcaatgtcactgcttaccgcctggtcatggccgggaaatattcgagagctttctaacgttattgaacgcgccgtcgtgatgaattcaggcccgatcattttttctgaggatcttccgccacagattcgtcagccagtctgtaatgctggcgaggtaaaaacagcctctgtcggtgagcgtaatttaaaagaggaaattaaacgcgtcgaaaaacgcatcattatggaagtgctggaacaacaagaaggaaaccgaacccgcactgctttaatgctgggcatcagtcgccgtgcattgatgtataaactccaggaatacggtatcgatccggcggatgtataacaccaaaacttgctatgcagaaatttgcacagtgcgcaattttctgcatagccgctcattctccttataaatccccatccaatttatcccttcatattcaattagttaaataactaaatccaataatctcattctggcactccccttgctattgcctgactgtacccacaacggtgtatgcaagagggataaaaaatgaaaacaaaattgatgacattacaagacgccaccggcttctttcgtgacggcatgaccatcatggtgggcggatttatggggattggcactccatcccgcctggttgaagcattactgtaatctggtgttcgcgacctgacattgatagccaatgataccgcgtttgttgataccggcatcggtccgctcatcgtcaatggtcgagtccgcaaagtgattgcttcacatatcggcaccaacccggaaacaggtcggcgcatgatatctggtgagatggacgtcgttctggtgccgcaaggtacgctaatcgagcaaattcgctgtggtggagctggacttggtggttttctcaccccaacgggtgtcggcaccgtcgtagaggaaggcaaacagacactgacactcgacggtaaaacctggctgctcgaacgcccactgcgcgccgacctggcgctaattcgcgctcatcgttgcgacacacttggcaacctgacctatcaacttagcgcccgcaactttaaccccctgatagcccttgcggctgatatcacgctggtagagccagatgaactggtcgaaaccggcgagctgcaacctgaccatattgtcacccctggtgccgttatcgaccacatcatcgtttcacaggagagcaaataatggatgcgaaacaacgtattgcgcgccgtgtggcgcaagagcttcgtgatggtgacatcgttaacttagggatcggtttacccacaatggtcgccaattatttaccggagggtattcatatcactctgcaatcggaaaacggcttcctcggtttaggcccggtcacgacagcgcatccagatctggtgaacgctggcgggcaaccgtgcggtgttttacccggtgcagccatgtttgatagcgccatgtcatttgcgctaatccgtggcggtcatattgatgcctgcgtgctcggcggtttgcaagtagacgaagaagcaaacctcgcgaactgggtagtgcctgggaaaatggtgcccggtatgggtggcgcgatggatctggtgaccgggtcgcgcaaagtgatcatcgccatggaacattgcgccaaagatggttcagcaaaaattttgcgcagctgcaccatgccactcactgcgcaacatgcggtgcatatgctggttactgaactggctgtctttcgttttattgacggcaaaatgtggctcaccgaaattgccgacgggtgtgatttagccaccgtgcgtgccaaaacagaagctcggtttgaagtcgccgccgatctgaatacgcaacggggtgatttatgattggtcgcatatcgcgttttatgacgcgttttgtcagccgatggcttcccgatccactgatctttgccatgttgctgacattgctaacattcgtgatcgcgctttggttaacaccacaaacgccgatcagcatggtgaaaatgtggggtgacggtttctggaacttgctggcgtttggtatgcagatggcgcttatcatcgttaccggtcatgcccttgccagctctgctccggtgaaaagtttgctgcgtactgccgcctccgccgcaaagacgcccgtacagggcgtcatgctggtcactttcttcggttcagtcgcttgtgtcatcaactggggatttggtttggttgtcggcgcaatgtttgcccgtgaagtcgcccggcgagtccccggttctgattatccgttgctcattgcctgcgcctacattggttttctcacctggggtggcggcttctctggatcaatgcctctgttggctgcaacaccgggcaacccggttgagcatatcgccgggctgatcccggtgggcgatactctgttcagtggttttaacattttcatcactgtgacgttgattgtggtgatgccatttatcacccgcatgatgatgccaaaaccgtctgacgtggtgagtatcgatccggaactactcatggaagaggctgattttcaaaagcagctaccgaaagatgccccaccatccgagcgactggaagaaagccgcattctgacgttgatcatcggcgcactcggtatcgcttacctggcgatgtacttcagcgaacatggcttcaacatcaccatcaataccgtcaacctgatgtttatgattgcgggtctgttgctacataaaacgccaatggcttatatgcgtgctatcagcgcggcagcacgcagtactgccggtattctggtgcaattccccttctacgctgggatccaactgatgatggagcattctggtctgggtggactcattaccgaattcttcatcaatgttgcgaacaaagacaccttcccggtaatgaccttttttagttctgcactgattaacttcgccgttccgtctggcggcggtcactgggttattcagggacctttcgtgatacccgcagcccaggcgctgggcgctgatctcggtaaatcggtaatggcgatcgcctacggcgagcaatggatgaacatggaacaaccattctgggcgctgccagcactggcaatcgccggactcggtgtccgcgacatcatgggctattgcatcactgccctgctcttctccggcgtcattttcgtcattggtttaacgctgttctgacggcaaccctacagacagaaggaatataaaatgaaaaattgtgtcatcgtcagtgcggtacgtactgctatcggtagttttaacggttcactcgcttccaccagcgccatcgacctgggggcgacagtaattaaagccgccattgaacgtgcaaaaatcgattcactacacattgatgaagtgattatgggtaacgtgttgcaagccgggttggggcaaaatccggcacgtcaggcactgttaaaaagcgggctggcagaaacggtgtgcggattcacggtcaataaagtgtgtggttcgggtcttaaaagtgtggcgcttgccgcccaggcaattcaggcaggtcaggcgaagagcattgtggcggggggtatggaaaatatgagtttagcgccctacttactcgatgcaaaagcacgctctggttatcgtcttggagacggacaggtttatgacgtaatcctgcgcgatggcctgatgtgcgccacccatggttatcatatggggattaccgccgaaaacgtggctaaagagtacggaattacccgtgaaatgcaggatgaactggcgctacattcacagcgtaaagcggcagccgcaattgagtccggtgcttttacagccgaaatcgtcccggtaaatgttgtcactcggaagaaaaccttcgtcttcagtcaagacgaattcccgaaagcgaattcaacggctgaagcgttaggtgcattgcgcccggccttcgataaagcaggaacagtcaccgctgggaacgcgtctggtattaacgacggtgctgccgctctggtgattatggaagaatctgcggcgctggcagcaggccttacccccctggctcgcattaaaagttatgccagcggtggcgtgcctcccgcattgatgggtatggggccagtacctgccacgcaaaaagcgttacaactggcggggctgcaactggcagacattgatctcatcgaagctaatgaagcatttgctgcacagttcctcgccgttgggaaaaccctgggctttgattctgagaaagtgaatgtcaacggcggggccatcgcgctcgggcatcctatcggtgccagtggtgctcgtattctggtcacactattacatgccatgcaggcacgcgataaaacgctggggctggcaacactgtgcattggtggcggccagggaattgcgatggtgattgaacggttgaattaatcaataaaaacacccgatagcgaaagttatcgggcgttttcttgaacatcgacggcgaaggtaaccccattaatcaccagtcaaaacttttcaccagcgtcagctcgccagcattacgcatcggtacaataaatgtttcctgtttctcattgaccgatccttcatcggtgatcagcgtcagttgggcggtcgtcaattccgtttcgctgcgcccaccatagtagttgatatacacctgatagcgcccgtgaactggtgctggcatggcgaaaatctcgggtccgtaccccgtcgtgacatccatatccagtgcaccactgtttttcagcacggtgttaccgtaccaggcgtgttcgccatcgggcgtgacaacatggagatcgagatcggtattgtccgtatcccacgagagaaccagccgtaaacgtgcacgaatcgttcctatacccgacgttgagtaaaactgcattttttgccggctttgcccatccgggctgatgacctgcacgctgttgctgccttcagtgaaaatataagggcgtgcaaatgaaccatcggattcaattctctgcggcatactggcaccgttgaccaccagccggccctgctgaactttacccgccgcagcataattctttattttgccgcggatctgcgctgagatattttgatcatctgccatgttgacggacgacgccgggtaattgatcgattgtgaaaaactggcatcttcgccctctgccggatgccagccagagagcggtgcgtcaatctcgacttcctgcacaccttcactgtgagcgacaggcgaaagtgccaccagtaacaacggaagaaaaatctttcgcatagcattagtccattaataattgtcgggtcagcgtttcgatatagttctcatcaagcccggtgggataaccatcaaaggccaggtgcagatactcatgggttaaatccagccgatcctgaagcgtaaagaagttacgaataaacagccgtttctgctgccgatcggtataggggaaacctgagactaaacgacagaccgcaaacacgtctggttcgttgtaccccgtctcgccttgtaatatacgccgccactgcggcatttttttcgccagccaggctttcgctttgggtaataactggcaggttgagcgtggagctccccagcggctaaggctgttgtcgggataagcaaacgcgagtatctggtcgtaacgctccccctgccccgcctgggccgtggcttgccgccaggaaagtgtcccttcggtagcgcgactgccatgataatgaaccggatcgcctgcatagatgagatcctgcgtccaagcggtcatcgttcgcgcccccgtggtcgctggcgaagcagaaacacgctgcgtggcgctgctgtcggggatggtcaggcaatcaccttcccgattggcgttttgctgtaaaaaagtacgtatcgccacggtcatggctttcgctgcctcaggtggcgtacttttcgcctcgcgatccagaactctggcaacgtactcttcacgatcgagatgcgactgcaatttcagtttgcccttttcgctcagtaaggtcgtctcaccgtggctgacaaacgtaatgtggttaccattagtaaacgtcacacgatagcgcccattaagtacgccgggttttactgccgtcgtactcttttccgctgtgattttcttcagcggatagcgggcaaacagctccacctctacacattgcccactggcaacctgcgtcggcactggcaaaacccgattaagcaccgtcgcataacgggttagtaccgttttgctggtgccactgccagtaacccacagcggtgtaccatcggttaaccagccagcaaaaccaccctggcggatttcctgtttatcatcggcaaaccagctccaggttttcacccgtacccgactaccgagcatggatgcgacaccgattttcgcctcgtccagcaccacatccagtaagacttcctgagctttgttttgcgcaggtaacgtcgctaatgaatcgagcagcgatttaaccgttaccgaggtttctggcttcagcgttgtaagagacgctaaccacgcaggtgcctgacgctgttgccagtattgcccccacacatctgcgccaatatgcaaccgctgcggcgcaaaatagagcccacaggaacgtaccagcgcggtatcgcgcgttatgctctccccagcctgacaacaataaacctcttccggggagtttccgcgacactggtagggctgctccggttgatgggtatcctccagccaggcgtaaacatacagtttccacaaactccctaacggcgtggtgagcgagtcaggtaatgctgagactttggtcacgcctgatgacgacagctgatacagttgatcgtgctgcgcaccgcgcagcaccagttgtaacggcgtctcctccgcaagcgttggcagagtaaccaacgccaatagccagacgattctgcgccagttcacttatttcacctgcatcccggtccattcactccctgccgcaacactttgctgcgcaggtgcataggaacgcacataacgagcaggaggcagaacgaattgccctttttgcgagaagcgcagcaaatggcggaaagtgaccgttcccgtcagttctttcaccggcaccatataggccagttcgcccatttcattacgcgctttttccagcaattgcccctgctgtttcgcggcgttgggtttattgactgaaatgccccatgttgtgcgctcaacgtcggctcccggcgggagcggtacttccacctgaccatagcgcagaactgcatcctgctcgctggtaagcgtaatttcatcgagatacagcgcatcgctgtcaatctcattgctggtcaccggctgcagagtaaagctcatctcttcttcaccggggataagccgatacaactggcgttcaacggtcaccggaatgttactttgttgagccgtttttgccggttcacgccagcggacctgcacattttgcggcgataattcgtcaccaaaagagagaatgtccggcacaccctgaccaacccaacgccagtcttcgccccctccagttaacttatgtttagcccatgcgcccgcaggcgcaggcaaaacaactggaggcattgtcgccatatatttcgccagccagttcatggccagcgcgcgctcaatagtggattgctcagcggtcaaaccacttaaaatagcggccgtctgggtagcgtcaccaccgctattgagcagcacaaccgtgtgcgccagcggctgattgctgtttgccgctttatcccacgcatattgctgaacctgtggcatcaccgtggacttcaactgcgcttttttcagcaacgtcatggttaagacgtttgccaccgcatctgccagtggagattccggtgtatcgaggatcaggctgtcattgatatcgcggatgtcttcctcagagaaatcttcatctttagttccgcgccgggcgatagcttcatccaaccctttcaacaacgttttgcacggcagattcatctcctgtgcccacgccagcaccagcgcccgatgcaataacggcatgttatccgcctgctcggcataactgtcgagcatatgctgccagtattccggttgttgcgttacgccgagcgcctggctggcctgccagtcggcgtaccatgcccatgccgtaaggaaggcgtcaccattgccatcttcaccccaccaggtaaagcgcgctccgggccccgccagttgcatcagccgcagacggttatcctgaatcatctgacgaatgtcgttagcggcggcactttgatgatcggcaagcgaacgccaggcgagactgagcgggatcagacggctaccggtgttgatcacgccaccccatggtccatcgactaacgcatcaagattgttgcggaaaatctcctgcggcgtttcgctactttgtagccggatattgctagcctgctcgggcaacatcagcgcgttctcgccaccgccgagcatgacatttttctgctgttcaacgggccagctgttatccacaaaagacagttttgtgctaatgctgtcctgcacttgcccattttgttgcagttctgcgcttaacaagccagattgctgaatgttctgcgccagcgaaatataattcgcccctttgtgcagcgtcagcgtctggcgcatctcagcgccggtaatgactccaacttattgatagtgttttatgttcagataatgcccgatgactttgtcatgcagctccaccgattttgagaacgacagcgacttccgtcccagccgtgccaggtgctgcctcagattcaggttatgccgctcaattcgctgcgtatatcgcttgctgattacgtgcagctttcccttcaggcgggattcatacagcggccagccatccgtcatccatatcaccacgtcaaagggtgacagcaggctcataagacgccccagcgtcgccatagtgcgttcaccgaatacgtgcgcaacaaccgtcttccggagactgtcatacgcgtaaaacagccagcgctggcgcgatttagccccgacatagccccactgttcgtccatttccgcgcagacgatgacgtcactgcccggctgtatgcgcgaggttaccgactgcggcctgagttttttaagtgacgtaaaatcgtgttgaggccaacgcccataatgcgtgcagttgcccggcatccaacgccattcatggccatatcaatgattttctggtgcgtaccgggttgagaagcggtgtaagtgaactgcagttgccatgttttacggcagtgagagcagagatagcgctgatgtccggcagtgcttttgccgttacgcaccaccccgtcagtagctgaacaggagggacagctgatagaaacagaagccactggagcacctcaaaaacaccatcatacactaaatcagtaagttggcagcatcacctgtgcggcgttataaaaaaccggttcgagattcttcggcagactggtcaacgtttcgttacgcagcagtttcgccacgccttgtggattgatatagagcggaacgatgccatcagtgggtattacatccaccattgccgggcggtttttattcagtgtttgcagggcgttattaaccagcgtgtcatcgagggagaaaagcagcgttttgttttgcatcgccagcgacacgcggaaaaaataatccgacattaattgatcgggttgcgccgcctgcgctttcggatactgaccgtatcgggaactcacttcgcgacgccagatttgcgcttcgccctgctgagtctggcttatcggcaaaacaccttctggcgctttgctttcgtgcgcaccaatattttgcgtaaacagtttccctggcaattgcgcctgttcggcagtgccatcaaactgaccgacaaacagcggggtttgcaattttgagtcttcataccagcacagccccgcggcaccgtctaacgccccattcagcttgtcgttttcctggctgatgtgcgaaagcatctcttcggcaataccgtgtgaatacggcaccaccacacagaagctggccccggcaggcatactgttccagaccggcgtaaaatcgaaactggtatctacgctggcggattcatcatttaacgccacaaaactgtgccagccgtcgttacccatttcgaagcgtacgccagcaaaagaaggcattaaccgctggtagccaaaacccagcaacctggcgctgaccacgatgcgctggcgtactggcgttttttcagcagcacgctcttccaggccaaagcttgcttgccagcgttttttgccgctcaacaaatcacctgcgatcgccgtggcttcggtatcctgctgatcatctttaaacaacatatccgtgctggaaaacaccagcatcttgtcctgataagtcgcgaacatcagggcgttattgccgttatagcgcaactgataaacaggaatagtttcactatttatcttgatgctactgatttccgttttgcttaactggctgtcgctggtagcggcaaacaacaatggctccagcagtttgcttaaaccactgcgctggatcagcaccatgtaatgtgaaagatggccttgtttatcgtgccatagcgcagcctgcgcgggctgatctaagagtgacgaaaagagtttatctttcagcgtgagatcgtgttcatagacaatgcgacgaatgctgccttcaatgcccagacgatcggcatgattctgataatagaaaacgaaatcttcactcagaacatcgtggagaaacggaatggtgaggagatctttgggaagctggctcagagagtcgctgtcgagaaagaggtccggctcattgagatcgatttgcagattgttgtgcaccaccagcggcgacaacgttttttctggcccactgccagcatattgcaacgcccagacaccagcggaaagcagtactattgcgccaaaacctacaagaccatagaaccgccagcctttcgctttttttcaccactcattgccacattccttgtgtatagccagccattttttacgggcacagccaaactttaccgtgccctaatacgacaaaagcccagactttgcagcctggacttttcaattcaaacaagggagatagctcccttttggcatgaagaagtaaaattattcttcttctggctcgtcgtcaacgtccacttccggagcgatttcatcgtccccttccgcggcactgccgtcgatggtatcgagatcttcctcgtcaaccggttcagcaacacgttgcagacccactacgttttcatcttccgcagtacggatgaggatcacgccctgggtgttacggcccacgatgctgatttctgaaacgcgagtacgtaccagcgtaccggcatcggtgatcatcatgatctggtcgcagtcatctacctgtaccgcgccaaccactaaaccgttacgttcggtaaccttgatggagataacccctttcgtcgcacgcgacttggttgggtattccgccactgcggtacgtttaccgtaaccgttttgcgttgcggtgaggattgcgccatcgccacgaggcacgatcagagagacgactttatcgccttcacctaagcgaataccgcgaacaccggtggtgttgcagcccatcgcacggacagaagactctttaaagcgcaccactttaccttcggcggagaacagcattacttcgtcttcgccgctggtcaggtcaacgccgatcagctcatcgccttcaaccagtttgatcgccactttaccggcggtacgcagacggttgaattcggtgaggacggttttcttcacagtaccgttagcggtcgccatgaagactttcacgccttcttcaaactcggtcactggcaggatcgcggtgatacgttcgtcctgctccagcggcagcaggttgacgatcggacgaccgcgcgcgccacgagtggcctccggcaactggtaaactttcatcgaatagacgcgaccacggctggagaagcacagaatatggtcgtgcgtgtttgccaccagcagtcggtcgataaagtcttcttctttaatacgtgcggcagatttacctttcccgccacgacgctgcgcttcgtattcagaaagcggctgatatttaacatagccctggtgagagagcgtcacgaccacatcttcctgggtgatcagatcttccaggttgatgtctgcgctgttggcggtgatttcagtacgacgtttgtcaccgaactgttcacgaaccagctccagctcttcacggatcacttccatcagacgatcggcgctaccaagaatacgcaacagttccgcgatctgatccagcagctctttgtattcgtcgagcagtttttcgtgctcaaggccggtcagtttctgcaaacgcagatccagaatcgcctgagcttgctgttcggtcaggtagtacagaccatcacgcacgccgaactctggctccagccattccggacgcgcagcatcgtcgccagcacgttccagcatcgcggcaacgttgcccagctgccacggattagccaccagcgcagttttcgcttctgcaggcgtcggcgcatgacggatcagttcgatgatcgggtcgatgttcgccagcgccacggctagtgcttcaaggatatgagcacgatcgcgagctttacgcagttcgaaaatagtacgacgggtcaccacttcacggcggtgacgaacaaacgccgcgatgatatctttcaggttcatgatcttcggctgaccatggtgcaatgccaccatgttgataccgaaagaaacctgcaactgggtctgggagtagaggttgttgagcacaacttcaccgaccgcatcgcgtttaacttcaatcacgatgcgcataccgtctttgtcagactcgtcacgcagcgcgctgatgccttccacgcgtttttcttttaccagttccgcaatcttctcgatcaggcgcgctttgtttacctgatacggaatttcgtggacgataatggtttcacgcccggttttggcgtcgacttccacttcagcacgggcgcggatgtacaccttgccacgaccggtacggtaagcttcttcaataccgcgacgaccgttaatgattgccgccgtcgggaagtccggccccgggatgtgttccatcagcccttcaatgctgatgtcttcatcatcgatatacgccagacaaccgttgatgacttccgtcaggttgtgcggcgggatgttggttgccatacctacggcgataccggaagaaccgttcaccagcaggttaggaattttggttggcatgacgtccggaattttttccgtgccgtcatagttatcaacgaaatcgaccgtctctttttcgagatcggccatcagttcatgggcaattttcgccagacggatttccgtataacgcattgccgccgcagagtcgccgtcgatggaaccgaagttaccctgaccgtctaccagcatgtaacgcagcgagaatggctgcgccatacggacgatcgtgtcataaaccgccgagtcaccatggggatggtatttaccgattacgtcaccaacgacacgggcagattttttataggctttgttccagtcattgcctagtacgttcatggcgtaaagtacgcgacggtgtaccggcttcaggccatctcggacatccggcagcgcacggccaacaatgaccgacatcgcataatccagataggagctcttcagctcttcctcaatgttgaccggtgtaatttctctcgcaaggtcgctcatctaaccgctatccctctactgtatcccggattcaaaggtcgcaaattataacacagccgcgcagtttgaggtaaacctatacgctttattcacatccaatgcctgatatactcgtttgtcttgccaattacggagtagaagtgccaatgaatgccgaaaaatcgccggaaaaccataacgtagaccacgaagagatcgctaaatttgaagccgtcgcctcccgctggtgggatcttgaaggtgagttcaaaccgttgcaccgcattaacccgctgcgtctgggctatattgccgagcgtgctggcggtttatttggcaaaaaggtgctcgatgtcggttgtggcggcggcattctggccgagagtatggcgcgcgaaggcgcgacggtgaccggtctggatatgggctttgagccattgcaggtggcaaagctgcacgcgctggaaagcggcattcaggtggattacgtgcaggaaaccgtggaagagcacgcggcaaaacatgccgggcagtatgatgtggtgacctgcatggagatgctggagcacgtacccgatccgcagtcagtggtcagagcctgtgcgcaactggtgaaaccaggcggcgatgtctttttctcgacgcttaaccgcaacggcaagtcatggctgatggcggtggttggcgcggaatatattttgcgcatggtgcccaaaggtacgcatgatgtgaagaagtttattaaaccggcagagctgcttggctgggtggatcagaccagtttaaaagagcgacatataaccgggctacattacaacccgatcactaattcctttaagctcggccccggcgtggatgtgaactatatgctgcacacgcagaataagtgaggttgatgtttggccgcgccaatgcctgatgcgacgcttgcagcgtcttatcaggcctacaaatgctctccgtaggccagataaggcgtttacgccgcatccggcaattgtgatggtcagacagcgattaccatttcaccgtcatcgacaaaaaccctgccgtctgggcaaaatcatcactccctttctgccacgccacgctgccgcgcagggacactcgctgactgatattgcccgtgactcccacttttatttcaccccgtcgcttcaccgcatcgtcactgatagtgctgccatcttcttcaatttccgtcgcatggggatcgtgataataattcagatctaatgttggtgtgacaccaaccgcggtacgccattcgctgtgtaaacccagccgcgtctgaatatcatccccctgcgattgtgacacgcgcgcatggttagcggcggtaaaatcatcctgctgcacgccctgataaatcacctgcgcctgcggttcaatcaccacaccacgccccggtaaccactgatacccggcttccagcgaggcgataatccccgacgaatggtaatgatctgtgccatcttcatgttcagaaacatcattgctaaaccacgcgtactgcaaccagttatccagccaggccccctgcttctgattaccgtgctgataccagcttgaggtcagcccaacggcataaccgtggttctggttatcggcgcgagttccggtcatattcgagcggctgtcgccctgattatcactgtagctaccaaccgccccaagcatccactcgccatccgtgccccagcgcccgctaaacaagccgccgctaagctgcaccgtagaagtgtcttcctgctgagccagttgccctgccgccgtgtaatgataacgtccgccgataacacgtaaattcagcgtctgaccatcgccaccagcgtgatcgcgtcgctccatcataaacgcctgatttgccgcccgcaggttattgagataaccgccaactttggcattcagcaccggctggtaagcaggcgtaggggccgggtcgggggttgggtcaggatccggtgtgggatcaggatcgggagtcgggttgggattaggtggcgatggcggcgttacttcttgcgatcgcagataccagtcgttgttatcttccaccagcgtgtagtcatacgctcccatattgacgtagccgctgcctgccagactgaactgcgcattgttttgaaactgcgtgggatcagctgcgaaatcaaccactttaatgcctgtcgatgtcggctcaccaatccctgtaatagagttaaccaccaccgtggtattgccagcagtattaccgttcatcaccaattgatcgcttaccgagtcatcgccgtttaattcgctatcgagcagtagcgtaccgccgccggtataatcaccgtttaccgtcagcgtatcgccagcgacgccattttgcaggctaaccgcaccggacgtattggtcagatcaccattaaccgtcacgtcggcaagataggtcaggctgtcagtttcaaggttggtattaagctcacctgtcaacgtcacgccatcggtagcattcaccagcgtcccatcgccgttaaacaatgaggcattaagggcgacggaagtatcctgcccggtcagacgcaaaaccgtaccatcgctgatatcgatagtgccgctggaagtagcatcgatagactgaatatcctgatccgcgccagtaacgaacgccgccccatcaccgacccacagtgacgaagcataaggaaagatatccgcaacatcgcctttcagggtgccttcttcgacacgtactgccgactgcgttgtaccgctggcggtcagctccagcgtacccgcccccgttttagtaaatgtgctaccctcatcctgatgctgcccgctgctgtcagccatcagtgcgccccactgcgtgtctacccccgcatcaactgccacttcaccgtcggcgcgcatttcaatatcacgcccatgctcagtcgtcgtagagcgagtatcgacattggcagtaatctccatcacgctttcttgttgcttatcggtaaagataacctggcggttatagtgggtatctccaagctgcgagttgtcgctcaccatcagcgtaccggaggcgatttgtgttgtgcccaaataactattattgtttgccagacttacctgcccgtcgctcgcatcgaccaccacgtagacgccatctttcccgtcgccgccgatatgcaaattgtcgccacctgcaagatctaccacatcctgactgccgataaccgttccgctgctgccactgacttcaaggccatcattgtatgatgtgccgctctgccaggtggagaaatcagagagatcgagcacaccgccgtttaacacgatcgactgcggatcgtcctggagagcggcgagatctgccgcgtcgccttccagcgaaagcaccgcaccatcatcaacgactatatcgccggttagcgccatcgactgcgcccccgacagcacgtagctgccgttttgcgcaatggtgagctgaccagcaccttcgatggtgccagcaaaactgccttgattaacagtaacattgccaccagcatcgatatttaaagtgccattctgaaagcccgtcaatgagtgcacaaaggtttgttgggtggagccaacgtttagctctgcctgattctggtacttatcaatactccctatcgtcagaccgtagcagtcttgcggatcgtcctggcaatgcgtatcgccgacattcatcagggagttgctgcggcccagggtaacttcaccgttttcaatctgcatctcaccagtaaagtcattgttatctgcattaagtaccagatcgccggaacctgttttggtgatcaacccggtaccagcaatagagtcaacagctccgtcattctctgtattgccaataaccagcgtttttccgtcggcaattagactggccccctgaatctccagacaaccagtatcacttaaataagtgatagtcttaatactagtttttagactagtcattggagtacagatgattgatgtcttagggccggagaaacgcagacggcgtaccacacaggaaaagatcgcaattgttcagcagagctttgaaccggggatgacggtctccctcgttgcccggcaacatggtgtagcagccagccagttatttctctggcgtaagcaataccaggaaggaagtcttactgctgtggccgccggagaacaggttgttcctgcctctgaacttgctgccgccatgaagcagattaaagaactccagcgcctgctcggcaagaaaacgatggaaaatgaactcctcaaagaagccgttgaatatggacgggcaaaaaagtggatagcgcacgcgcccttattgcccggggatggggagtaagcttagtcagccgttgtctccgggtgtcgcgtgcgcagttgcacgtcattctcagacgaaccgatgactggatggatggccgccgcagtcgtcacactgatgatacggatgtgcttctccgtatacaccatgttatcggagagctgcccacgtatggttatcgtcgggtatgggcgctgcttcgcagacaggcagaacttgatggtatgcctgcgatcaatgccaaacgtgtttaccggatcatgcgccagaatgcgctgttgcttgagcgaaaacctgctgtaccgccatcgaaacgggcacatacaggcagagtggccgtgaaagaaagtaatcagcgatggtgctctgacgggttcgagttctgctgtgataacggagagagactgcgtgtcacgttcgcgctggactgctgtgatcgtgaggcactgcactgggcggtgactaccggcggcttcaacagtgaaacagtacaggacgtcatgctgggagcggtggaacgccgcttcggcaacgatcttccgtcgtctccagtggagtggctgacggataatggttcatgctaccgggctaatgaaacacgccagttcgcccggatgttgggacttgaaccgaagaacacggcggtgcggagtccggagagtaacggaatagcagagagcttcgtgaaaacgataaagcgtgactacatcagtatcatgcccaaaccagacgggttaacggcagcaaagaaccttgcagaggcgttcgagcattataacgaatggcatccgcatagtgcgctgggttatcgctcgccacgggaatatctgcggcagcgggcttgtaatgggttaagtgataacagatgtctggaaatataggggcaaatccagcaatatcaaaggtaacttcacttaagccgagatacataaagccacccgccgcagtggaaggaccatctccatagcctgctgcgctgttgttctcatccactaacacgccgccgttctggctgtagctgtcatcaacagaaatatcaataagatagggagccgtcgcgctattggtatatatcgccccgccataaccttcggcagtgttatttgtaaaggcagtgttatttattatcgtataacctggaggatgcttgctgtcgctattattatcggtaacatcgattgccccgccatcgccatcactgtaacttgttgatgtatatgcctggttgttatcaaaaataacatcacttaaatagacgtcattattaatggtataaattgcgccacctttgccatcattagcgatattattgcgaaacatggcgttagtgacacttaaatcgacggcaccagtatcgttagtaccagaagaatagattgcgccaccatagccgcctgcgacgttaccggaaaaaatgacatcagtaagattcagcgttgagttttctttagcaaatatggccccgccgttataatattctcctgtaacggtgttattggcaaacagagtcattccagtttcgttttctggtgataatgtaaattccgctccttgttgcaaaaatacggccccaccgctggcattattggtcatatccgaaaaaaccagccattgcccatcggcgatactccagtcctgcgtaatgcctgaaaggctttgcctgctggcgtgacaactcgctttgatatcatatccctggcataaatcaatggccgccgcgacaccgttagcagagaaaagagatgcaatcattgacgggagtagagataaatactccttgcgtagaaagataatccgcatattaatctgaccatcattttatataagacggcatatttaaacgcattatacaatatgggttatctttcttttgtaaattgtccaacccgatgcaatggctattttgttattatttgatgaataatatcagtgcgtcataattcaagttaataaccttaagggataccagttatatttaaactaaattatagtaatgaataattttcttataatataaggtaaattaacaaaatggcttcgcatttaacaataaccgaatagaaaacaaccatttcgacatcaacaatcgcttacattcgcttatatattgaccacaactgatacatcagattatgtgatgactcgtgcttagatcaatttttgcaatcattaacaaaaagattaataaaccatctatatcaatttatccaacctattctgccgttcaagaaatcgccgaacagttatttttaacaaatttttctcttcccattgactttcccggacaccttgtctgacctaaggtgcgcgaaagccactttttccttcctgagttatccacaaagttatgcacttgcaagagggtcattttcacactatcttgcagtgaatcccaaacataccccctatatatagtgttctaagcagcttcccttactacaggtagtctgcatgaaactattgcggaaagaattccaaaaacaggtacgacatacatgaatcagaatctgctggtgacaaagcgcgacggtagcacagagcgcatcaatctcgacaaaatccatcgcgttctggattgggcggcagaaggactgcataacgtttcgatttcccaggtcgagctgcgctcccacattcagttttatgacggtatcaagacctctgacatccacgaaaccattatcaaggctgccgcagacctgatctcccgtgatgcgccggattatcagtatctcgccgcgcgcctggcgatcttccacctgcgtaaaaaagcctacggccagtttgagccgcctgcgctgtacgaccacgtggtgaaaatggtcgagatgggcaaatacgataatcatctgctggaagactacacggaagaagagttcaagcagatggacacgtttatcgatcacgaccgtgatatgaccttctcttatgctgccgttaagcagctggaaggcaaatatctggtacagaaccgcgtgaccggcgaaatctatgagagcgcccagttcctttatattctggttgccgcgtgcctgttctcgaactacccgcgtgaaacgcgcctgcaatatgtgaagcgtttttacgacgcggtttccacatttaaaatttcgctgccgacgccaatcatgtccggcgtgcgtaccccgactcgtcagttcagctcctgcgtactgatcgagtgcggtgacagcctggattccatcaacgccacctccagcgcgattgttaaatacgtttcccagcgtgccgggatcggcatcaacgccgggcgtattcgtgcgctgggtagcccgattcgcggtggtgaagcgttccataccggctgcattccgttctacaaacatttccagacagcggtgaaatcctgctctcagggcggtgtgcgcggcggtgcggcaacgctgttctacccgatgtggcatctggaagtggaaagcctgctggtgttgaaaaacaaccgtggtgtggaaggcaaccgcgtgcgtcatatggactacggggtacaaatcaacaaactgatgtatacccgtctgctgaaaggtgaagatatcaccctgttcagcccgtccgacgtaccggggctgtacgacgcgttcttcgccgatcaggaagagtttgaacgtctgtataccaaatatgagaaagacgacagcatccgcaagcagcgtgtgaaagccgttgagctgttctcgctgatgatgcaggaacgtgcgtctaccggtcgtatctatattcagaacgttgaccactgcaatacccatagcccgtttgatccggccatcgcgccagtgcgtcagtctaacctgtgcctggagatagccctgccgaccaaaccgctgaacgacgtcaacgacgagaacggtgaaatcgcgctgtgtacgctgtctgctttcaacctgggcgcaattaataacctggatgaactggaagagctggcaattctggcggttcgtgcacttgacgcgctgctggattatcaggattacccgatcccggccgccaaacgtggagcgatgggtcgtcgtacgctgggtattggtgtgatcaacttcgcttactacctggcgaagcacggtaaacgctactccgacggcagcgccaacaacctgacgcataaaaccttcgaagccattcagtattacctgctgaaagcctctaatgagctggcgaaagagcaaggcgcgtgcccgtggtttaacgaaaccacttacgcgaaagggatcctgccgatcgatacctataagaaagatctggataccatcgctaatgagccgctgcattacgactgggaagcattgcgtgaatcaatcaaaacgcacggcctgcgtaactctacgctttctgccctgatgccgtccgagacctcttcgcagatctctaacgccactaacggtattgaaccgccgcgcggttacgtcagcatcaaagcgtcgaaagacggtattttgcgccaggtggtgccggactacgagcacctgcacgacgcctatgagctgctgtgggaaatgccgggtaacgatggctacctgcaactggtaggtatcatgcagaaatttatcgatcagtcgatctctgctaacaccaactacgatccgtcacgtttcccgtcaggaaaagtgccgatgcagcagttgctgaaagacctgctcaccgcctacaaattcggggtcaaaacgctgtattatcagaacacccgtgacggcgctgaagacgcgcaggacgatctggtaccgtcaatccaggacgatggctgcgaaagcggcgcatgtaagatctgatattgagatgccggatgcggcgtaaacgccttatccggcctacggctcggtttgtaggcctgataagacgcgccagcgtcgcatcaggctccgggtgccggatgcagcgtgaacgccttatccggcctacggctcggatttgtaggcctgataagacgcgccagcgtcgcatcaggcacaggatgcggcgtaaaatgccttatccggcattaaactcccaacaggacacactcatggcatataccaccttttcacagacgaaaaatgatcagctcaaagaaccgatgttctttggtcagccggtcaacgtggctcgctacgatcagcaaaaatatgacatcttcgaaaagctgatcgaaaagcagctctctttcttctggcgtccggaagaagttgacgtctcccgcgaccgtatagattaccaggcgctgccggagcacgaaaaacacatctttatcagcaacctgaaatatcagacgctgctggattccattcagggtcgtagcccgaacgtggcgctattgccgcttatttctattccggaactggaaacctgggtcgaaacctgggcgttctcagaaacgattcattcccgttcctatactcatatcattcgtaatatcgttaacgatccgtctgttgtgtttgacgatatcgtcaccaacgagcagatccagaaacgtgcggaagggatctccagctattacgatgaactgatcgaaatgaccagctactggcaccttctgggcgaaggcacccacaccgttaacggtaaaaccgtaaccgttagcctgcgcgagctgaagaaaaaactgtatctctgcctgatgagcgttaacgcgctggaagcgatccgcttctacgtcagctttgcttgttcctttgcctttgcagaacgcgaactgatggaaggtaacgccaagattattcgcctgattgcccgcgatgaagccctgcacctgaccggtactcagcatatgctgaatctgctgcgcagcggcgcggatgatccggagatggcggaaattgccgaagaatgtaagcaggagtgctatgacctgtttgtccaggcggcacagcaagagaaagactgggcggattatctgttccgtgacggttcgatgattggtctgaataaagatattctctgccagtacgttgaatacatcaccaatatccgcatgcaggcagtcggtttggatctgccgttccagacgcgctccaacccgatcccgtggatcaacacctggctggtgtctgataacgtgcaggttgctccgcaggaagtggaagtcagttcttatctggtcgggcagattgacgcggaagtggacaccgacgatttgagtaacttccagctctgatggcccgcgttaccctgcgcatcactggcacacaactgctgtgccaggatgaacacccttcccttctggcggcgctggaatcccacaatgttgcggttgagtaccagtgccgcgaaggttactgcggctcctgtcgcacccgactggtcgcaggtcaggtggactggattgccgaaccgttagcctttattcagccgggggaaattttgccctgttgttgccgggcaaaaggcgatattgaaatcgagatgtgaattggttgtagtgccagatacaacgcttatacgtcttatctggcctacaacgattacatggcgtagtaatacgctttcacctgctcccagtccgctttggggattggctccagatattttccagctggcggaagtcatgattaatcgctttattgcgacgcaagcggcgacgacttttctccaggtcaagaaaaccagcttctgctttaccttctgttttcacatagatatggcgaacataacaacagccatgctgacgattaacgctatgcattttcttaaacgccagcgccactgctttcaacatggcttgccgtacttcgtcagaatagggcgatactgcatgccgggcataccagtcagcaatgctgatgaaccccgccatatcttcagtcaccagcaacgcgcgccattcaccctcaattttcaccgcttcaccaaaaacgatcttcggcacgatgacaccggcccgttccagttctttaattaccgcaacctcacggacaatcgttggtcggccgaacggataacgtacggaatgaaacagatgatgcgtcatgcgctttacatacagctttttgccgttgcgctcgacgcattgcaccccgctcataccattacggcgatagttaggctcttcaacccagtcgccctctgttgcccaccagtgattaaattcgtcgtactttgctgaaactgccataccctatcgcctgtcatttttattaacgacaatgactataggtggttacctgaggaaaatcttaatgaaacgtgtcgtattaatgaatttcttttgccgctactagtgtgacaccgcttttgcccttcatttgcagcgcatagattccaccagccacgaccactaatagtgcgcccagcagataaaatgtgaatttaatcaggtggatacagcgatgaattttattcgacagggattaggcatcgccttattaccagagttaacgctgaaaaccattgcaggtgaattgtgttccgttcctcacgaaccaaccttctatcgacagatttcgttgttggctaaagaaaagccggtagaaggcagtccactgtttttactacaaatgtgcatggaacaattagtggcgattggaaaaatttgatatgagacaggatggcgcatgaacgccatcctgcagtagcattactctttattaaggaattttactgccttatcagggaaatcagtaaacagcccatttacacccgctttgttatacagagcatcatataactgattcacatcagtagtgtattcaggcagtttatccgaccgcacggtataaggatgcactaccagtttattctgctgagcatcttgcaccatgccagtgagtttgatattacccggctgcgatgtttcctcaatcaacatatggtaatccggcccgataccgtcggcatattccgcgacttgcttcatggcacctggcttaaacatccagtcatagctgtaattaacccagcttccgtccggctgtttctgctgcgtttcattccagtcggtataggcaatcagctgtaccagattgagatccatgcccattttaggttccagctcattcttaatacgcttcagctcatcagcatcaaaacattgcaaataaactttatcgtccttaccggtgtaaccatatttcttcagcacttccagcgtttttgccgcaatatccttcccttcctgatgatggaaccacggcgctttgatttctggatagataccgatatttttcccggtagagtgatttaacccctgaacaaattcaatctcttcttcaaaggtgtgcccccggaagtcggacttacccattgggaaacgccccggataagtctgtacttttttaccgttttcaatatcgaaaccttcggtaaatttcagcgacttaatttcatccagcgtgaaatctatcgcgtagtaacgaccgtctttgcgcgcccgatccgggaaacgatcggcaacatcagtaacacgatcgagataatggtcatgcagaacaaccagatggtcgtctttggtcatcaccaaatcctgttccagataatccgctccctgcgcatacgccatcgcttttgctggcagcgtatgctccggcaaatatccactggcaccgcgatgggcgatgactattttttcgttgctgtccgccgccattgcactgcttcccatgactatagtgctcatcatgatcgccatgctaaggtttttcagcttcaatttcatgccattagcctccgttgcgtttttgcagtaattgttcatggcgacgtttttcgccaatcatcacaacaatcaacaagataaccgccagaatgctgccgccaatcattaccataaagccgccatcccagccgaagaagtccacggtgtagccaacaatcgcgctcgccgccaccgaaccgcccaggtaaccaaacagcccggtaaagcccgctgccgtacctgccgcttttttcggtgccagttccagcgcatgcagaccgatcagcatcacaggaccgtagatcaggaagccgataacaatcatacaaatcatatcgacggttgggttacctgccgggttcatccagtaaacgatagtcgcgatggtcaccagtgtcataaagaaaacgccggttgccccacggttgccacggaagactttatccgacatccagccgcacagcagagtgcccggaatacctgcatattcataaaggaagtaggcccaggaggatttatccagcgcgaaatgcttaacctctttcagataagtcggtgaccagtcgaggatgccgtaacgcagcagataaacgaacacgttggcgatggcgatataccacagcagtttgttcggcagtacgtactgcatgaagatttgcttcgccgtcagctcctgttccgctttttcgttatagtcgtccggataatcatttttgtactcttcgatcggcggcaagccacaggattgcggggtatcgcgcatcatcgcaaaggcgaataatgccaccagaatggcgcagaaagcaggcatatagagcgccgcatgccagtcattgaaccaggccatccccagcaggaacagcagcggcggaataccaccaccgacgttgtgcgcacagttccacactgacacaatgccgccacgttctttctgcgaccaccagtgcaccatagtacgaccacacggcggccaccccatcccctggaaccaaccgcagaggaacaacagtacaaacatcaccgcaatgctcgacgtcgcccatggcacaaagcccataaacaacatcactgccgccgccagaatcaaacctgcgggcaggaaaacgcgcggattcgagcgatccgataccgaacccatgatgaatttcgaaaatccataagcaatcgagatccccgaaagggcaaaacctaaatcaccgcgtgagaatccctgctcaaccagataaggcatagcaagcgcaaagttcttacgaaccaaatagtaagccgcatagccaaagaatatccccaggaaaatttgccagcgcaatcgacgataagtcggatcgatctccgcggcaggtaagcgcgctttgtgtggcgctggtttaaaaatactcaacattgatagcctccgtggcccgtggtcttatttatgattaacagcctgattcagtgagagaacctgccgtttcttgagttgccgcgatgttaagaaaacattcataaattaaatgtgaattgccgcacacattattaaataagatttacaaaatgttcaaaatgacgcatgaaatcacgtttcactttcgaatcatgagcgaatatgcgcgaaatcaaacaattcatgtttttactatggctaaatggtaaaaaacgaacttcagagggataacaatgaaaactcgcgactcgcaatcaagtgacgtgattatcattggcggcggcgcaacgggagccgggattgcccgcgactgtgccctgcgcgggctgcgcgtgattttggttgagcgccacgacatcgcaaccggtgccaccgggcgtaaccacggcctgctacacagcggtgcgcgctatgcggtaaccgatgcggaatcggcccgcgaatgcattagtgaaaaccagatcctgaaacgcattgcacgtcactgcgttgaaccaaccaacggcctgtttattaccctgccggaagatgacctctccttccaggccacttttattcgcgcctgcgaagaagcagggatcagcgcagaagctatagacccgcagcaagcgcgcattatcgaacctgccgttaacccggcattgattggcgcggtgaaagttccggatggcaccgttgatccatttcgtctgaccgcagcaaacatgctggatgccaaagaacacggtgccgttatccttaccgctcatgaagtcacgggactgattcgtgaaggcgcgacggtgtgcggtgttcgtgtacgtaaccatctcaccggcgaaactcaggcccttcatgcgcctgtcgtggttaatgccgccgggatctgggggcaacacattgccgaatatgccgatctgcgcattcgcatgttcccggcgaaaggatcgctgctgatcatggatcaccgcattaaccagcatgtgatcaaccgctgccgtaaaccttccgacgccgatattctggtgcctggcgataccatttcgctgattggcaccacctctttacgtattgattacaacgagattgacgataatcgagtgacggcagaagaggttgatattctgctgcgtgaaggggaaaaactggcccccgtgatggcgaaaacgcgcattttgcgggcctattctggcgtgcgcccgctggttgccagcgatgacgacccgagcggacgtaacgtcagccgtggcatcgtgctgctcgaccatgctgaacgcgatggtctggacggatttatcaccatcaccggtggcaaactgatgacctatcggctgatggctgaatgggctaccgacgccgtgtgccgcaaactgggcaacacgcgcccctgtacgaccgccgatctggcacttcctggttcacaggaacccgctgaagttaccttgcgtaaagtcatctccctgcctgccccgctgcgcggttctgcggtttatcgtcatggcgatcgcacgcctgcctggctgagcgaaggtcgtctgcaccgtagcctggtatgtgagtgcgaagcggtaacagcgggtgaagtgcagtacgcggtagaaaatttaaacgttaatagcctgctggatttacgccgtcgtacccgtgtggggatgggtacctgccagggcgaactctgcgcctgccgcgctgccggactgctgcaacgttttaacgtcacgacgtccgcgcaatctatcgagcaactttccaccttccttaacgaacgctggaaaggcgtgcaacccatcgcctggggagatgcactgcgcgaaagcgaatttacccgctgggtttatcagggactgtgtggtctggagaaggagcagaaagatgcgctttgatactgtcattatgggcggcggcctcgccggattactctgtggcctgcaactgcaaaaacacggcctgcgctgtgccattgtcacgcgtggtcaaagcgcgctgcatttctcatccggttcgctggatttgctgagccatctgcctgatggtcaaccggtgacagacattcacagtggactggaatctttgcgtcagcaggcaccagcccatccttacagtcttctcgaaccacaacgcgtgctcgatctcgcttgccaggcgcaggcattgatcgctgaaagcggtgcgcaattgcagggcagcgtggaactggcccatcagcgcgttaccccgctcggcactttgcgtgcaacctggttaagttcgccagaagttcccgtctggccgctacccgcgaagaagatatgtgtagtggggataagcgggctgatggatttccaggcgcatcttgcggcggcttcgttgcgcgaactggatctttcggttgaaaccgcagaaatagagctgccggaactggatgtcctgcgcaataacgccaccgaatttcgcgcggtgaatatcgcccgtttccttgataatgaagaaaactggccgctgttacttgatgcgcttattcctgtcgccaatacctgcgaaatgatcctgatgcccgcctgcttcggcctggccgatgacaaactgtggcgttggttgaatgaaaaactaccttgttcactgatgcttttgccaacgctgccgccttccgtgctgggcattcgtctgcaaaaccagttacagcgccagtttgtgcgccagggtggcgtgtggatgccgggcgatgaagtgaaaaaagtgacctgtaaaaatggcgtagtgaatgaaatctggacccgcaatcacgccgatattccgctacgtccacgtttcgcggttctcgccagcggcagtttctttagtggcggactggtagcggaacgtaacggcattcgcgagccgattctcggccttgatgtgctacaaaccgccacgcggggtgaatggtataagggcgatttttttgcgccgcaaccgtggcagcagttcggtgtaaccactgatgagacgctacgcccgtcgcaggcagggcaaaccattgagaacctgtttgccatcggttcggtgctgggcggatttgatcccatcgcccagggatgcggcggcggtgtttgtgccgtcagtgctttacatgccgctcaacagattgcccaacgcgcaggaggccaacaatgaacgacaccagcttcgaaaactgcattaagtgcaccgtctgcaccaccgcctgcccggtgagccgggtgaatcccggttatccagggccaaaacaagccgggccggatggcgagcgtctgcgtttgaaagatggcgcactgtatgacgaggcgctgaaatattgcatcaactgcaaacgttgtgaagtcgcctgcccgtccgatgtgaagattggcgatattatccagcgcgcgcgggcaaaatatgacaccacgcgcccgtcgctgcgtaattttgtgttgagtcataccgacctgatgggtagcgtttccacgccgttcgcaccaatcgtcaacaccgctacctcgctgaaaccggtgcggcagctgcttgatgcggcgttaaaaatcgatcatcgtcgcacgctaccgaaatactccttcggcacgttccgtcgctggtatcgcagcatagcggctcagcaagcacaatataaagaccaggtcgctttctttcacggctgcttcgttaactacaaccatccgcagttaggtaaagatttaattaaagtgctcaacgcaatgggtatcggtgtacaactgctcagcaaagaaaaatgctgcggcgtaccgctaatcgccaacggctttaccgataaagcacgcaaacaggcaattacgaatgtagagtcgatccgcgaagctgtgggagtaaaaggcattccggtgattgccacctcctcaacctgtacatttgccctgcgcgacgaatacccggaagtgctgaatgtcgacaacaaaggcttgcgcgatcatatcgaactggcaacccgctggctgtggcgcaagctggacgaaggcaaaacgttaccgctgaaaccgctgccgctgaaagtggtttatcacactccgtgccatatggaaaaaatgggctggacgctctacaccctggagctgttgcgtaaaatcccggggcttgagttaacggtgctggattcccagtgctgcggtattgcgggtacttacggtttcaaaaaagagaactaccccacctcacaagccatcggcgcaccactgttccgccagatagaagaaagcggcgcagatctggtggtcaccgactgcgaaacctgtaaatggcagattgagatgtccacaagtcttcgctgcgaacatccgattacgctactggcccaggcgctggcttaaactcctttctgatgcccggtaagcatgtggttaccgggcatttttgcgtacacgattccgtgcccaatgtatgcgttgcaacgcagtgaaaattcctctgaaaacgtctcgcaaaggctgaaactggcagatgtcaaaggcctgggataaccgtaatgtcgcgtcatcataaatatcaggtgacggacaaccatgaccgaatcaacaacctcctccccgcatgatgcggtatttaaaacctttatgttcacacccgaaaccgcacgggattttctcgaaatacatttgccagaaccactgcgcaagctttgcaacctgcaaaccttacgcctggaacccactagttttattgaaaaaagtttacgcgcttactactcggatgttttgtggtccgtggaaaccagcgacggtgacggctatatctactgcgtgattgaacatcaaagctctgcagaaaagaatatggcttttcggctaatgcgctatgccactgccgccatgcagcgtcacctggataaaggctatgacagagttccgctggtggtgccattgctgttttatcatggcgaaacatcgccctacccgtactcacttaactggctggatgagtttgacgatccgcaacttgcccggcagttgtacaccgaagcttttccgttggtggatatcaccatcgtacctgacgatgagatcatgcaacatcggcgtatagctctgcttgaactgattcaaaagcatattcgcgaccgcgatttaatcggtatggtcgacaggatcaccacgcttttggttaaaggcttcactaatgacagccagctacaaacactgtttaattatctgctgcaatgcggcgatacctcccgtttcacccgttttattgaggagatttccgaacgttcaccactacaaaaggagagattgatgactattgctgagcggctacggcaggaaggacaccaaattggctggcaggaaggtatgcatgaacaagccattaaaattgctttgcgcatgctggaacagggcattgatcgtgaccaggtgctcgcggccacccagctaagcgaagccgatctggcagcgaataaccactaattaacacaggcccacagccgatccccatgggcctttgatatcaataactaccttttatgcgtggcccatttttgcctgatttaaacatcgccagtcgttgatccagggcatcgctgtagagcatcgtgtcaacgccaacagcgacaaagttcgctccccacgccaggcattgctgcgccatatcaggagccacagccagaaaaccagccgctttacccgcagcacggatccgccgaatgctggtttcaataattcgctgcacttccgggtgcccggcgttatccgggtagcccaacgacgcagaaagatccgctggtccaataaacacgccatcaatcccttcgacgtcgaggatctcgtccaggttatccagtgccgttttactttccacctgcactaacagacaaagcgaatcgttgacttgcgccatgtaattctcaatgcgtccccagcgcgcagcccgtgccacactggccccaacaccacgctcaccgtagggaggatagcgcgtggcagacgccacctgacgagcctgatcggcagtatcgaccatcgggatcaatagagtttgcgcgccaatatccagaacttgtttaatcagcgatttactgccttccaccggacggatcacgggttggctggcatagggcgctaccgcctgtagctggtgataaagatcctgaatggtgtttggcgcgtgctccccgtcaatcagcaaccagtcataaccggaagtagcggcaatttctgccatataagaagtagtcgagcttaaccacagaccaatttgcacttcgcccttgcgtaaacgttctttaaagggattggttaataatgcgttcatcgtgttccttaacctatttaatgatgtgccacgtcggtctgcgcaacagtacgatttacacgcagagtgaaaataatcagcgaaccgatgaccgccaccgctgccagtgtcagtaatcctgccgcatcgctggcaaataacgtttctgctttcacgcgcaggatcggggcaataaacccgcccactgcaccaaacaggtttacaaaaccaatccccgcagccagcgccgtaccggaaagcagttgtgtcggcatcgtccagaacaccggctgcacggcaataaacccgatagctgcaacacacagcgctacgatcgccattactggagaaagcagcccggacagaccaataccaatgcccgccgccagtaatgtcagcgctgcgacattacgccgttcgccggttttatcggaatagcgcggaataagccaggtcccaaacaaggccgcaacccacggaatggcggtgaccaccgacgctgtaaagcccacttttgttcccagcaatgccgcaacctgggtcggcaggaagaaaattaatccgtaaaccgccacctgaatggtcaggtagataatcgctagttgccagactcggccattacgcagcgcatcgctcagccgagaagtcactttctgttgttcttcacttgccagttgattgataagcaacgttttttcttgtttactcagaaaacgtgcctgctccggtgtgtcatcaagccaaaagaatgtgaataccccagcaccgactgccaacaatccttcaatcacaaacatccagaaccagccgggatgccccataaatccatgcatctccaacagcgcgccggaaagcggtgatcccagtgttaacgccagcggtgcgcccatatagaacagccccataatgctggcgcgattacgctgcggaaaccattgcgaggtgagataaatcataccagggaaaaatccggcctccgcagcaccaagcagagtgcgaactatcagaaatttcgcttcagtatcggcccatgccatggctgccgaaagaaatccccacagcagtgttgtcgtaccaatccaggttctggcccccagtttgcgcatcaaaagattcgccggaacacccagaaacgcatataccacaaagaaaatgcctgctcccagcgcataagcttcattactcaacccggtatcaatctggtaggtctgtttggcaaaaccgatattcgaacggtcgagaaacgccagcacatacagcgccaacataaacggaattaaacgcacacggtttttcttcaccacggcgtcaagcaaagcggtgctcataaaaagctccttagaatatgtgggcgttaccgttgtcacagcaacgcccggagtgattagtggctgtaggggcgtttcaaattgcagtcacgattgagttcgacgccaaaaccgggtttatcaagcactgatttatgaatacgaccattcaccggaaccggctcattgagcagaatcgggtcaaactgcggacgcatcgttgaacaatccgggctggtcatcaggaattcgctgaatggcgtattggtgaaggtgatcaccgcatggtgagagtaaacagacgaaccgtgcggcaccaccagttgccccctggatttggcgattgcggcaatttccaccagcgtggttaaaccaccgcaccagccaacatccggctgcataatgtcgataccggtttctgaaagcgtacgaaaagattgcagtgtgccgtggtgctcaccgctggtgaccatcattccgactggcgcgttgcgtttcagttcgcgataaccttcatactgctgtggcggcaggcactcttcgatccatttcaggttatagggcgcgcaagcgtgggccagtttggtggcatagttcacgtcctgactcatccagcagtcgagcattaaccagaaatcctcaccgcatttttcacgcatatccgcgaccataacggcatctttgcggatccccgcatcgccatcatgtggcccccagtgcgtcggcattttgccaccgataaagcccatctcttttgccagatccggacgcgcgcctgtggcgtagaactgaatctcatcacgaactgcgccgcctaaaagtttataaaccggaagcccgaccactttgccgaacagatcccacagagccagatcgacacaggaaatcgtgttcatcaccaggccaccagagccggagtaatacagggtggcattgagcatttgatcatggatcagtttgatatcactgacacatttaccctcaatgaaacggttaagatgtttttcgacaataaaacagcccatttcaccggctgtcgaaacagcgaatccggtctggccgttttctgcttcgacttcaacaatcaacgtgccaagaacgttaatgccaaatgactggcgtgactgctcgtaatcgcggtatttactcatcggggtggcaatatgatcgtcaatccagtgattcgccccctggtcgtgataatcaccgccgccagcacctttttctgctgtcgcaccgccagtaaaccaggcgcgaacctgtttgatttttggtagggtcatgatgttctccattgttatgaggcctgtaagtcaaagggacttttccatcccaacagacgtgaaatatccctggcgcaggcaatggccttgcccgccagataatcacggtattcttcattgatttgtaagcgggtaccgaccaccgagatcgcagcggtaagctcgttattggcgttaaacaccggcgcagcgacacaacggacatcggggtaatcttcgccgttgtcatagctccagccctgacggcgaatacgcgccagttcttcgtgaagttgctgtggatgagtaatcgttgtgggtgtcgcctgctcccagaccagcccttcgataatactttgctgtaccgctgcaggttgccaggcaagcaggcatttacctattccggagcgataaagcgaaaggctttttccttcatgggaacgcacgctgatagtggctgatgactccacttttaaaatgtaataagcgctgccgttatcaataatccccaggtgacataacagcccggtggtatccatcagttgcgtcaaacgcggtcgagccagttcccggagatccatcttgcttaacgcatgaccagaaagctccaccagcctggtccacaaacaaaaattttcctggtgatcaaggctaagaaaacgctgacgcctgagttcattaagcagcaaataggccgtgcttttagggattcccaatgtgtcaatgatcgtcgcagcactacaggggccaatgcgggcaatcaaattgagaatatcaatagcccgtgtcagggcgggaactttgcttgattccaacatactggactccagtcttagatactggaatcagtctcgttgctcagggggagtaaaattgtgaagcgcatcaaatcccgctcctcgtccagcggactggagaaattacgcacaaatttgtgaatcagtgcacggattttttcttattgagtacaacaggttggacaagttttgccggagggggaatgtgccggtgcagtaaaccggcacagagtggcggaatcagacagataaggtcatggactcaacaacctcaatccagccatgctcactggcgatatcctggccgtttaaccaacggcgcagcatattcagtgccatcattgcgcacacttcctgacggatagccaggctgtagcgtgtagtgctgaaacgcacacgcagagcgaaagtgccgtctggcgtggctagcgcaaagttgagatgctcgttctcgaaacccgaaacagccagtgccagcccggcaaaatggttggcccgccgttctgtaatccagtgcgcagtttgcgccagggtttcttcctgtgaaggaaccacttcacacgccagcaatggagcacctgcgcgagaaagttgcaaagccaataaaccaccggtgaattgctcgctcaacgtcaggctgaactggcggttttgcaattcgcgactgatctgcgcgggcagtccttcggtgccttcgaaaatcacgctctgtccggcaacacgtttaacgtccagccacagtttttccatcgcctgttgctcgcttgccggtccggtgagtttcagttcgatgatcggcattgaggagcgatagcccattgttacacccggcggcagttgtagagtgtccaggctttgtgccagatcgctttccgaacgaccaaaggtagttaaacgcagacaaaccggcgactgtggtaaagaaaaacgctcgcgcaggcgcggcaggatttcgtgctcgaccatcaccttaaattctgacggtacgccgggagtaaagaacatcaggcaacgattaagccgcacggcaaaaccacaggcggtgcctaccgggttattgataaattcagcactggcaggcagctccgcttgtttacggttgctcggtgccattactcgtccacgttcgtggaaatagcgttccatctctttgagccaggcttcatgcagcaccaggccttcaccttttgctgtcgcagcggcgagtgcacttaaatcatcactggtcggtcccagcccgccgttaacgatcagcacatcggcgtgctgactacgttcgcgaagaatggtgactaagtcatcaaggttatcccccaccgtattgcggcgagataatggcaacccctgatgaaagaaaaaatcggccagccaggcagcgttagtgtcaacgatttgcccgtgtaacacttcatccccggtggataacatttccacttttaacatggttatctcctgcttttgttatcgaatcactataacgcaaagggagataaggcgtagtaagaaactgaatggcgcgacagaatgccgcgccggaagggatcagaaactggcgttaaccccaacatacgggccgtcagccacggcgttgtcgcggttaccgtctttacccgacagattcaggtagcgataacccgcctcaatactgactggatgcataatggtgtaacgcgcgccagcattcgcttcctcataacttttaataccgctggagagtgaatccggagagtagtaatactcgccaaacaaacggaagctgttgccaattttccactgcaaaccacctcctaccgctgcggcataaccttcatcgccgtaattcgggttggtgtaaacgccttttccgccaacggtcgccattaacggcccgagaggcagattcaaccccagccccacgccagcgacgtcaccgtcgtcgtcgttatgtgtccagttaccgcttaacgccaggcccgtcgattcagtcccaaaaccgacaccaatattggtgtattctttacccgcctgaccgctgatgctcattgcattgaccgatgcagaaaccaacagcattccggccagacctgctagcgcaatttttttcattatcccctttcccacaagcaattaatcaaaattcccaaagctgcgggattgtactgcctggcacagaggattcaatgagcgaaaaaagggatctagtcacttattgtaactaaatacttcttaaataattaaacgccgaaaaaataaacacactttaccgatacacacaaaaataataataagtgcagttatcatcgcaaaagagattactgtcactttcacatatttctgagttaccgtattctcatggtttctttttatttataaggaatacccctgtgcgacaacggactattgtatgccctttgattcaaaatgatggtgcttatttgctgtgcaaaatggccgacgatcgcggcgttttccccggtcaatgggcgctttcgggtggcggcgtggagtctggcgaacgaattgaagaggcactacgccgcgaaattcgcgaagaactgggagaacagctgcttttgacagaaatcacgccgtggaccttcagcgatgatattcgcaccaagacgtatgcagatggtcgcaaggaagagatttatatgatttacctgatttttgactgcgtttctgccaaccgagaagtgaaaataaacgaagagtttcaggactacgcgtgggtaaaacctgaagatctggtgcattatgatttaaatgttgccacccgaaaaacgttacgtttgaaaggtcttctttaacaatgatgacagccatcactggctgtcagattgaaaatttagtggttaacgaattccccatccagataaactttgcctttttccacatgcatgactaaaccatccagataatcaggtttaaatgtcgcatcacgcttatttttagcaatatatgtcaggcaatgattatgggtgaaaataacgatatttttatcaggcgctttgctttgtaagtccttaattgcactataaatctcattaccgcactgaagaagtcgtttatctaccgtcagttttttacccgcggaaaaccaggtcgccgactgaatggtccggacggtattactggaataaagatcgaaatcagggatgtcagcgctaaaagcgttgcccagttcacgggcatcctgggtacctttaaccgtaatacctgttttatctgacaagcattgattggttgaacgatcgcaacgttcagcatggcgaaacaaaacgacaaccgggtgctgctgtgccagtctggccaatgttttattgtcgatacgtggcaaaccattgctactccaggcggcatgagtacccagtccggcaattgcagcgagcgccagtaaaatgatgaaatatttttttgacttcaatgatgagcggcaaaaagctaacacgtaaactccacctatagacaagcgcaaccagacaattaccgtgaaattgagcgacatttctggcgataattagcagttggtgtaatattaaaaatcctacgatgtcggcaaaatgcctcaaaattttgccaaatgcaaagcctaaataagaaaaaatataaaaatttcaatatttacgtctaatattagtttcttaaggttaagttaatattctatccttaaaatttcgctccaaatggcaaaatatacacaacactctttatagcaaatataagtggacaggtattcaatggcggaaggaaaagcaatgtcagaatttttgcctttttcgcgaccagcaatgggcgtggaggaactcgctgcagttaaagaggttctcgaatccggttggatcacaaccggtccgaagaatcaggcgcttgagcaagccttttgccagttgacgggaaatcagcatgccatcgcggtcagttcagccaccgccggaatgcatatcacgctaatggcgttggaaattggcaagggcgatgaagtgattacgccttccctgacctgggtttcaaccctcaatatgatttccttgttgggtgcaacgccggtaatggtggatgtcgaccgcgatacgctgatggtcacgcctgaagcgatcgagtcagccattacgccacgcactaaagccatcattccggtgcattatgccggtgcgccagcagatattgacgccattcgcgccattggcgaacgttacggcatcgcagttatcgaagatgctgcccatgccgtcggtacgtattacaaagggcgacatattggcgcaaaaggtaccgctattttttcatttcatgccattaaaaatattacctgtgcggaaggtggcctgattgtaactgataatgaaaaccttgcccgccagctacggatgctgaaatttcacggtctgggtgtcgatgcctatgacagacaaacctggggccgtgcaccgcaggctgaagtcttaacaccgggctataagtacaatctgaccgatattaacgccgcgattgccctgacacagttagcaaaattagagcacctcaacacccgtcggcgcgaaattgcccagcaatatcagcaagcactggcagctctcccctttcagccattaagccttcccgcctggccgcacgttcacgcctggcatctgtttattattcgtgtcgatgaacaacgttgtggtatcagtcgcgatgcgttgatggaagcgttaaaagaaagaggcattggtaccgggttacatttccgcgccgctcacacacaaaaatattatcgcgagcgttttcccacgctgtcgttaccgaataccgaatggaatagcgaacgcatctgttctttgccgctgttcccggatatgactaccgccgatgccgaccgtgtcatcacagcccttcagcaactcgcaggacaataagccatgtttgaaatccaccctgttaagaaagtctcggtggttattcccgtttataacgagcaggaaagcttaccggaattaatcaggcgcaccaccacagcctgtgaatcgttggggaaagagtatgagatcctgctgattgatgacggcagtagcgataattccgcgcatatgctggtcgaagcctcacaagcggagaacagccatattgtgtctattttgcttaaccgcaattacgggcaacattcagcgattatggcgggattcagtcacgttactggcgacttaattattacccttgatgccgatctccagaatccgccagaagaaatcccccgcctggtggcaaaagccgatgaaggttacgacgtggtagggactgtacgccagaaccgccaggacagctggtttcgtaaaacagcttcgaagatgattaacaggcttattcagcgcaccaccggcaaagcgatgggtgactacggttgtatgctgcgcgcctatcgccgtcatattgtcgatgcgatgttgcactgccatgaacgtagcacctttatcccgattctggcgaatatcttcgcccgccgtgccattgaaattccagtacatcatgccgagcgtgagtttggtgaatccaaatacagttttatgcgcctgattaatttgatgtacgacctggtgacctgccttaccacaacgccgctacgtatgctgagtctgctcggcagcattattgcgattggaggttttagcattgcggtgctgctggtgattttacgcctgaccttcggaccacaatgggcggcagaaggcgtctttatgctatttgccgtgctgtttacttttattggcgctcagtttatcggcatgggattgctcggtgaatatatcggcaggatctacaccgatgtccgcgcccgcccccgctattttgttcagcaagttatccgtccatccagcaaggaaaatgaataatgaaaaccgtcgtttttgcctaccacgatatgggatgcctcggtattgaagctctgctggctgccggttacgaaattagcgccatttttacccataccgataatcccgctgaaaaagccttttatggttcggtggctcgtctggcggcggaaagaggcattccagtttatgcgccggataacgttaatcatccgctgtgggtggaacgcattgcccaactctcaccagaggtgattttctctttttattatcgccatcttatttgcgacgagattttgcagctcgctcccgcaggtgcatttaatctgcacggttcgctgttaccaaaatatcgtggtcgcgcgccgctgaactgggtgctggtgaacggtgaaacggaaacgggcgttacattgcaccgaatggtaaaacgtgccgatgctggggccattgtggcgcaactgcgcgttgccattgcgccagacgatatcgctattacgctgcatcataaattgtgccatgccgcgcgccagctactggaacagacattacccgccattaaacacggtaatattctggaaattgcccagcgcgaaaacgaagccacctgttttggtcacagaacgccagatgacagtttccttgaatggcataaaccggcatccgtactgcacaacatggtacgtgccgttgccgatccgtggccgggtgccttcagctatgttggcaatcagaaattcaccgtctggtcgtcgcgtgttcatcctcatgccagcaaagcacagccggggagcgtgatttctgttgcgccactgctgattgcctgtggcgatggcgcgctggaaatcgtcaccggacaggcgggcgacggcattactatgcagggctcgcaattagcgcagatgctgggcctggtgcaaggttcacgcttgaatagccagcctgcctgcaccgcccgacgccgtacccgggtactcatcctcggggtgaatggctttattggcaaccatctgacagaacgcctgctgcgcgaagatcattatgaagtttacggtctggatattggcagcgatgcgataagccgttttctgaatcatccgcattttcactttgtcgaaggcgatatcagtattcattccgaatggattgagtatcacgtcaaaaaatgtgatgtcgtcttgccgctggtggcgatagccacgccgattgaatatacccgcaacccgctgcgcgtatttgaactcgattttgaagagaatctgcgcattatccgctactgcgttaagtaccgtaagcgaatcatcttcccgtcaacttcagaagtttatgggatgtgtagcgataaatacttcgatgaggaccattctaatttaatcgtcggcccggtgaataaaccacgctggatttattcggtgtcaaaacaattacttgatcgggtgatctgggcctatggcgaaaaagagggtttacagttcaccctcttccgcccgtttaactggatgggaccacgactggataaccttaatgcagcgcgaattggcagctcccgcgctattacgcaactcattctcaatctggtagaaggttcaccaattaagctaattgatggcggaaaacaaaaacgctgctttactgatatccgggacggtatcgaggcgttgtaccgcattatcgaaaatgcgggaaatcgctgcgacggcgaaattatcaacattggcaatcctgagaacgaagcgagcattgaggaactgggcgagatgctgctggcgagcttcgaaaaacatccgctgcgccatcacttcccaccgtttgcgggctttcgtgttgtcgaaagtagcagctactacggcaaaggatatcaggacgtagagcatcgtaaaccgagcatccgcaatgcccgccgctgcctggactgggaaccgaaaattgatatgcaggaaaccatcgacgaaacgctggatttcttcctgcgcaccgttgatcttacggataaaccatcatgaccaaagtcggcttacgcattgatgtcgatacctttcgtggcacccgtgaaggcgtgccacgtctgctggaaatcttgagtaagcataatattcaggccagcatttttttcagcgtcggcccggacaatatgggccgccatctctggcgactggtgaagccacagtttttgtggaagatgctgcgctcaaacgcggcatcgctttatggctgggatattttactggcaggtacggcctggccaggtaaagagattggtcatgccaatgccgatatcattcgtgaagcggctaaacatcacgaagtcggcctgcacgcctgggatcaccatgcctggcaagcccgtagcggtaactgggatcggcaaacaatgatcgacgatattgcacgcggtcttcgcactctggaagagattatcggtcaaccggtaacctgttctgccgctgcgggctggcgtgccgaccagaaggtgatcgaagcaaaagaagcgttccatttgcgctacaacagcgattgtcgtggggccatgccgttccgtccactgctcgaatcaggaaaccctggcactgcgcaaattccggtgaccttacccacctgggatgaagtgattggtcgggatgtgaaagcagaagattttaacggttggttactcaaccgcatcctgcgagataaaggcacgccggtttataccattcatgcagaagttgaaggctgcgcttatcagcataattttgtggatctcctcaaacgcgcagctcaggaaggcgtgacattttgccctttaagcgaactgttatcagagacgttgccgctcggacaagttgttcgcggaaatattgccggacgtgaaggctggctgggttgccaacaaattgcgggtagtcgctgatgaaatcggtacgttaccttatcggcctcttcgcgtttattgcctgctattacctgttaccgatcagcacgcgtctgctctggcaacccgatgaaacgcgttatgcggaaatcagtcgagaaatgctggcatccggcgactggattgtgccccatctgttagggctacgttatttcgaaaaacccattgccggatactggattaacagcattgggcaatggctatttggcgcgaataactttggtgtgcgggcaggcgttatctttgcgaccctgttaactgccgcgctggtgacctggtttactctgcgcttatggcgcgataaacgtctggctctactcgccacagtaatttatctctcattgtttattgtctatgccatcggcacttatgccgtgctcgatccgtttattgcattctggctggtggcgggaatgtgcagcttctggctggcaatgcaggcacagacgtggaaaggcaaaagcgcaggatttttactgctgggaatcacctgcggcatgggggtgatgaccaaaggttttctcgcccttgccgtgccggtattaagcgtgctgccatgggtagcgacgcaaaaacgctggaaagatctctttatttacggctggctggcggttatcagttgcgtactgacggttctcccctggggactggcgatagcgcagcgggagcctgacttctggcactattttttctgggttgagcatattcaacgctttgcactggatgatgcccaacatagagctccgttctggtactacgtgccggtcatcattgccggtagcctgccgtggctgggattactccccggtgcactgtacacaggctggaaaaaccgcaagcattccgcaaccgtctatttgttgagctggacgataatgccgctgctgtttttctccgtcgctaaaggtaaattgcccacctatattctttcctgctttgcatctctggcaatgctgatggcgcattacgctttgctggcagcaaaaaataatcctctggcgctgcggattaatggctggattaacatcgcttttggcttcactggcattattgccacatttgtggtctccccgtggggaccaatgaacacgccggtgtggcaaaccttcgagagctataaagtcttttgtgcctggtcgattttttcgctatgggcatttttcggctggtacaccttaacaaacgtcgaaaagacctggtcttttgccgcgctttgcccgctggggctggcgttgctggtaggattttcaattcctgacagagtcatggaaggaaaacatccgcaattttttgtcgagatgacacaagaatcacttcagccaagccgctatattcttactgatagcgtcggtgttgccgcaggtctggcatggagcctgcaacgcgatgacatcatcatgtatcgccagacaggtgagttgaaatacggccttaattatccggatgcgaaagggagatttgtcagcggtgatgagttcgcaaactggcttaatcaacatcgtcaggaggggattattacactcgtgctttcggttgaccgcgatgaagatatcaacagtctcgccattccgcccgcagatgccatcgatcgtcaggagcgtctggtgctgattcagtatcgtcccaaatgatctggctaacattagtctttgccagcttgcttagcgttgccgggcagttgtgtcagaaacaggcaacctgctttgtggcgataaacaaacggcgcaaacatatcgtgctgtggctgggactggcgctggcttgtcttggtcttgccatggtgctctggctgctggtcttgcagaacgtaccggtaggcattgcctacccgatgttaagtctgaattttgtctgggtgacgctggctgcagtaaaactgtggcacgaaccggtatcgccgcgtcactggtgtggggtggcgttcattattggcggcattgtgatcctcgggagtacggtgtaatgggcctgatgtggggattattcagcgtcattattgcctcagttgcgcaattaagcctgggttttgcggcgagtcatctgccgccgatgacgcacttatgggattttatcgcggctctgttagcttttggcctggatgcccggatactgttactcgggctgctgggttatctgctttccgttttttgttggtataaaacgctacataaacttgcgctaagcaaagcctatgccttgctcagtatgagttatgtgctggtatggattgcttcaatggtacttcccggctgggaagggactttttcgctgaaagcactactgggagtagcctgtattatgagcgggttgatgctgattttcctgcccacgacaaaacaacgttactgagttttccctgccactttacactgccgttcccactcatcggggctataactgcttgccgagaggactttcaccgtatgcagcttttcacgattaatacaataaagcgcattctgcaaaggcgagagtaaatcccccactttcacggcgaagtcactcttcacttcggcgatcatttttatcgcgccgccagcatcgcagagcataagtacatgtctgttatcttgtttattgcagcacgattttttgaccagccattccattgcattatcctgtttgctaagagttttcacatcaatttacagattaacagataaacctattatcaacggcaatggaatggcaaaattgcgaagtgaaactaatgatttcttaatcctggcgttgcacccactcttttaacgcctgacgtgaaattttaataccgccgtttttcagctccggcggtaaagttagccagcgcaccggttgttgaaaacgagccagcttatctttcacccattcgccaagatcaacggtttgctggtcatactccaccaccgctaccggtcgatgaccaaactccttgtcggcaacggggacgataaacacctgcaaaaccgcaggatgtgcagcaattacgcgctcgacttcttccggctgaataccctctccgccactgaagaacagattgtctaaacgtccgacaatggtcagcttgccattatgcatctcaccgcgatcgcgcgtagcgtaccagccttcgtcattaaccagtgaaaccagttgcccgttacgccagtaaccttctgccatactggcagcccgcagccacacttcattattaacgattttcacttcccgacccggcagcggcgaaccaacgtctgccaggccgtcggcttctttcgcacacaccgtggaggcaaactcggtcagaccatagccgcaaaagcaacgaatcccctgctcgcgcgcctgttccgtcaactcgaccgggatagccgcgccgccaagtaacaccgctttcagggaaacggaactgcggttaaccagcaaacgccagagttgtgttggcaccagtgaagcgtgagtacagcctgccagcatttgctccaatggctgtttatcacgcaccgtcatccgcgcaccagcgtataaccagcgccacataattccctgaccggagacgtgaaacagcggtaaagagagcaaccagtcatcgtgatcgccaaacggaatcagcgataacacaccttgcgcactggcaagatgggcctgataagtatggacagcggctttcggcaaaccggtagaacccgaggtcaacgtcattgagcacagacgcgtcggctgccacgtagcggcatgtgcgccttcaacccgctgaatgtgcagcgacgttaatgccggaaacgtgttttccccatccggcaccagcgcaaattgcagcgtcagattgggcagcaattcttcaagcaacggttgcggcagctgagggttcacgggcaacacccgcgccccgcattgcagtaacgccagccaggcgagcagcgtttgcggcgtattccacgcccgcaacatcacgccgctgccctcaaccacaccctgcgccgcaaagcccgtagctaactcatcgacgcgagcacaaagctcgcgccagttgagttgctcgtcattaagacgtaaggcgatggcttctccccgcacttgccgccagtgacgccacggccagtcagagaagatcataacaactgctccagtacatcagcgtccactaacggcagtgggctccccggccagcgacgaacctgctgcgcctgcatcagatccagcgtgtccagtcccggaatggtgtctggcgttaaccaggcagcaatccgcgccagttgcgttagacctaagctcgactcaatggaagaactgatcaccgccgtcagccccagcgcatgcgccgcctgtacctgctcgcgtactttttccagactgcccgtgagcgtgggtttgataactaccgcgcgcacgccctcttcagccacaaaggcaaaatccggctcgcgcaggctttcatcccaggcaatggcaatgccggtttcacgggcaaacgctcgcgaatcatcgcgggttttgcacggctcttcgagaaacgcgatgcggtggcgataatccgggttaacatatttggcaaactgctgacctttcagcggtgtccaggcgcgatttgcgtcaagacgcaaatgcagatccggaattgcctccagcaacagattaaccaccatgccgtcgcgcacggcttcgtacaatcccactttgaccttcgccactttctcgcctggcatatcagcaagtttgaggatcagatcgtcaggatcgccattacacagtggtgccgcacggtaattggccgcctgcgggagcgtatctgccagctccgccaatgcacagcttacgccaaaggcaacggaaggcatctgcggtagctcgccatcgcctgccagccagttatttacccaagcaagcagcacaatttgcgcctcttcccaggtttcctgactgaagcccggcagtggggagatctccccccacccttcgcgctcgccttcacgcaggcaaacatacagcccgtcgcgggtttttaaccgcctgtcgcgcagaaccatccccgcgtccatggggatctgccagcggtatacctgcgcgctacgcattacggattccgtttaaatttgctgaaatcaggctgacgtttctggttgaaagcgttgcgaccttcctgaccttcttccgtcatgtagaacagcatggtggcgttgcccgccagctcctgcagacccgcctgaccgtcacagtcggcgttcagcgcagctttcaggcagcgcagcgccatcgggctgttttgcagcatttcgcggcaccaacggacggtttctttttccagatccgccagcggtaccacggtgttgacaaggcccatatccagcgcctgttttgcatcgtactgacggcacaggaaccagatttcacgcgcttttttctgtccgacgatgcgagccatgtaggaagcgccccagccgccgtcgaaggaaccgactttcgggccagtctgaccgaagatggcattatctgccgcgatagtcaggtcgcacatcatgtgcagaacgtgaccaccgccgatggagtagccagccaccatcgcgacaaccggtttcggacaggtacggatctgacgctggaagtccagcacgttcaggtgatgtacgccggaatcatctttatagccgccgtaatcaccacgcactttctggtcaccaccggagcagaacgctttatcgcctgcgccagtcagaatgatcacgccgacgttgtcgtcataacgcgcatctgccagtgcctggatcatctcttttaccgtcagaggacggaaggcattgcgcacctgcggacgattaatggtgatttttgcgataccgtcggtggatttttcataacgaatgtcctcaaaaccttcggagcagtcgtgccattcaaccggtgcgtaaagcattgcttcatcaggataaatcatattgtgtcctttagtcagaaacgcaagatctgcgccagacttgcgataacgccagcgggattttcccgatgcgcgttatgtccggcgcgaggaatgacatggcagtcggcagccagttccgccgccaaggcgcggaatttgctgtcacgttcaccacataaataataaaacgcaaatgtgcgggcgctaaggttagcacgtaaatcaggctggacggcgagagaagtcgcctccagcatggcggcaagggttgcgccattattgttactgcgcagcgccaccagctcccggcgttgatcgtcattgagcgaggcaaaaacaggctgttgataccagtcggcaaataccgccgttaacggttctgtgcgaaaacgctgcgcccattggcgatcggaacgctgacgttccgcgcgttgttcagcattttgcaacccaggatgcccgccttcgacaacaaccccacaaagccccggcatcccctggcaagccgccatcatcgccacccgtcccccaagcgagtaccccaccaaccagaagttaaggatgttgtaactaaccagggttttacgcagtaagtcggtgacatcatcaaatccatcgacgctaatcgccgccgaaccaccgtgacctgggagataaacatacaaccgtgagtagtcggcaaacgcctcgcccacttcttgccattcgtggcaatcgccggaaaaaccgtgcaaaaacaccagccagggtaaacctggtttgccgtgttttgcctgcgcgtgcaggatcataaatggcttacctgcgccagaagttgctggagcgtttgcgcaccatcggtgtcgttaaccaccatttcaattaccgtggtggttggcgtgcgccaggcatcggcaagtgccgtttcaagttcctgccagttttgcggacgatgatatttcagctcgaacatcgcggcggcgtgctcaaaatggacgttttgcggcatcagatagaaacgctcgcgctcgcttttcggcgttggcagcagcgagaaaatttgcccgccgttgttgttcaccacaattaatatcagcggcgcggaaacctgacgcaataacgccagcgcgttgagatcgtaaagtgcggagagatcgcccacaatcgccagcgtcggtttgccgcttgcccgctgaacgccggcggcagtcgagagcagcccgtcgataccgctggccccacggttgctgtacaccgggtaacctgccggaagttgcgaaagcgcatcaatcagacgtaccaccaggctgttaccgacaaacaattgcccctgttcaggcagatagtcgctgatgcgatgcgccagttgcgcttcgccaaacgcatcgcgacgggcaataaccgcctgcattgcctgttccgccaggcgcgggatttcaacgcaccagggctggcgtttttctgccggatgcagctccagccagtcggcaatattggcaattaagcggcgtccacgatggtgcgccggatcaagccgcccttcgatgtcatccacaatccagtactcttcgggttcacagcttgcctgccattgcaggagccgtttgcccgtcaggctgcttcccagttgcaccacaatttgcgcctgttgcagttcgctggtcgctttggcattgcctaaccagagatcggcacacggcagcggctgtccggtttgcgacagcacgtcgccaatcagcggccagccaagagtttgcgcccacagtgcaacttttttgccctcttccgcactcatgcgcccggcaaccaccacgccgcgtttttgtcgccagaagaaccagtcgcgctgtttttcactttccagacgaggcgcttcacgcagccacggtttgtcgtcctgccaccagtcgcccagccgctgttgccagctaagcccggtgtcgtccatttcgccatacagcggttcggcaaacgggcagttgatatggactccaccagaatgaagcgtaccgagagcatggtcgatggtagaaaccagccaacgtgcggggatatcctgggtcgggcgcggcaatgaaatactgtgcgtggggtgagaggcgaacattcccggctgacgaatcgcctgattcgcgccgcagtcaatcagctccggcgggcgatcggcggttaacaggatcagtttttctccggttaacccagcttcaatcagtgccggatagagatttgctaccgccgtaccggaggtcacaatcaccgccaccggctgcttgctgactttcgccagccccagcgccagatgccccaacccacgctcatcgaaatgggtgtggtgaatgaatgcggaattctccgccgccgctaacgttaacggtgtagaacgcgagccaggggcgatacagatgtgtctgacgccgtgacgcgttaatgcttccagaatgaccgccgcccagcgtcggttaaatgcgcttactgacatgagtttgtccggtatcaatattgcggctaagtataaggagctacaaaaatagattattgatatgaatcggtaatgatgcgactcattactattccatctgtaataaagtacgcagccctgccgctttgttgtcgatttcctgccactcttgctcggggtcggaaccacggacaatgcccgcgccagcatataatcgcacgacattgccgctaatttttgctgagcgcagggaaacgcagaattcgctttgctgtaatgagagatagcccgcagaaccggcgtaccattctcgggtgaacggttcgtgacgggcgataaactgtcgcgccagatcgcgcggtaagccagcaactgctgccgttggctgcaactgatgtaaacagatcacattatccgctttgttgagtgaagtccagatacagcggcgaagatgctgcactttacgcagacgcagtacctgcggcggtaaaacatccagcgtctgggtatcggcctgtaaccgttggcagatatcttccaccaccagcatattctcgcgctggtttttatcatccgccatcagccactcacctaactgctgcgcctgcttatcatcaggatgatttgctaccgttcccgccagcgcttcagtacgcagcgctttgtcacgccgccgccataaccgttccggtgaagagccaagaaaagcattttcgccatcaaaggccatgtaaaaatggtagcaattcagattcagtcgacgactggcagccatcatcgccgccgcgttgaccggacttgcgaaatgcaggtcagttgcccgagcgagcaccactttgtcgagctcaccttcggcgatggttttcgttgccagttcgattaattgcgtccagcccgttttgtccggccagtgttgttctcgcgtggtggttaaatgtaacccaggcaagggcttgatactcaccagtgtggcgataaattctcttgccttaatcgcatcgtgctgaagggagctttcgctgaatagcgtcagccgcagcgtggctttaccgccacagcgtcgccattccaggcgtggtaaaagtaaattgccctgcgacgggtcaaacgcattcagcccccaaatgcgtaagtcggcgtgttccgggtgctggcgaagaaaacgttgtgcctggtccaacgacgtaaaacgggtaatcgcgcccaggacggcagcttcttcatcaccattacgttgttgccagtagaattgcgggtatgtttgctgactggccagccagctcaaggcatcaaaagcgtctttgagagggaaaggaatatcgataacccgaatgccgggtgtcgccggaatctcttgcgacaaatggcgcagtagattttccagcgccgtagtaagtgattgcacgcggacctctccctgttaaaagcctcacattatacggggtactacaaaaaaaatgcagtaccccggtgtagggaggttttaacggcgtgccagcaacagtcctagtaccagcccaacggccgcgcccacaccaattccttgccagggtttttcgtggacgtagtcatcagcacgataaactgcctgcttcgcccgatagtaataactgtctgaagcctggctaacccgttttttcacatcatccagcgctttttctgcacgcgctttcagctcaacatatttctgatcggcgggatcgccagaggagcggagcacctcttccagtgtttcactaagcagcgtcaggtcgtcatcgatacgtgtatcaccaaactgattagacattctcgttctccatttgcgtaaaacctgtcactaactatagacaagggttgttgattacgcctgaattacctcgcgtgccatcccaatgtgtgggataccatcttcttcatagacctccgtcacagggataaaaccgaaactctggtagaagttttgcagatgcgcctgcgccccgaggtaaacaggcttatcaggccagtgatgcgtgcaggtgtcgagggttttactcatcagttgctgccccactttttcgccacgcaacgcttcactgacaatcacccgaccaataacgaccggctcaagatcatcatcacttttcagaatcctcgcatatgccaccagttcatcatttttccaaccgagaatatggcgattatcccccgtcaaatcatcaccatcgatatcctgataagggcaattctgctcgacaacaaacaccgcgcaacgcagttgtaataaggcataaagctgggaaaccgataattcagagtgatgcagatcttgccattcaatcataatgctctccttttagatgtatgccttatactagccggaatattttttgaaacgtgatgaactcatggaattaatttttttaggtacttcagccggtgtgccaacccgcacgcgcaatgtcacggcaatattgcttaacctgcaacatccgacccagagcggactttggttgtttgactgcggtgaaggcacccagcatcagctactgcataccgcctttaaccctgggaaactggacaagatttttatcagtcaccttcatggcgatcatctctttggtttacccggcttgctgtgcagtcgttctatgtcaggcattatccaacccttaacgatttatggtccgcaaggtatccgtgaatttgtggaaaccgcgctgcggattagcggctcatggaccgattatccgctggaaattgtcgaaattggcgctggcgaaattctcgatgatggcctgcgcaaagtgaccgcttatccgatggaacacccactggaatgttatggctatcgtattgaagaacatgataaaccgggtgcattaaatgcccaggcattaaaagctgctggcgtgccgcctggcccactgtttcaggaattaaaagcgggcaaaacaatcacgctggaagatggaaggcagattaacggcgcagattacttagctgctccagtgccaggtaaagcgctcgctattttcggcgataccggcccctgcgatgccgcacttgacctggctaaaggtgtcgatgtcatggtgcacgaagcgacgctggatataaccatggaagccaaagccaatagtcgcggccatagctctacacgccaggctgcgacactagcccgtgaggctggagtcggcaagctaatcattacccacgtcagctcgcgctatgatgacaaaggttgtcaacacctgttacgtgaatgcaggtcaattttcccggcgactgaactggcgaatgatttcaccgtgtttaacgtttaactctgcggtgatgctgccaacttactgatttagtgtatgatggtgtttttgaggtgctccagtggcttctgtttctatcagctgtccctcctgttcagctactgacggggtggtgcgtaacggcaaaagcactgccggacatcagcgctatctctgctctcactgccgtaaaacatggcaactgcagttcacttacaccgcttctcaacccggtacgcaccagaaaatcattgatatggccatgaatggcgttggatgccgggcaactgcacgcattatgggcgttggcctcaacacgattttacgtcacttaaaaaactcaggccgcagtcggtaacctcgcgcatacagccgggcagtgacgtcatcgtctgcgcggaaatggacgaacagtggggctatgtcggggctaaatcgcgccagcgctggctgttttacgcgtatgacagtctccggaagacggttgttgcgcacgtattcggtgaacgcactatggcgacgctggggcgtcttatgagcctgctgtcaccctttgacgtggtgatatggatgacggatggctggccgctgtatgaatcccgcctgaagggaaagctgcacgtaatcagcaagcgatatacgcagcgaattgagcggcataacctgaatctgaggcagcacctggcacggctgggacggaagtcgctgtcgttctcaaaatcggtggagctgcatgacaaagtcatcgggcattatctgaacataaaacactatcaataagttggagtcattacccgattatccgacttattaaaaatgcctgtttaaaattatataatttagcacataccgcaaccaactcccaccttaaaccaactggtccggataattcagatgttctcctgttcaaaaagctattctccccttcgaaattaatgacaattatcggtgatgaaattcctcttatatctgaaaaacagtcgctttcaaaggtgcttttaaatgatgagaataatgaactgagtgatggtacaaacttctgggataaaaatcgtcaattaaccacagatgaaatagcttgctatcttcagaagatcgccgctaatgcaaaaaatactcaagtcaattatcctactggtctctacgtcccctactccaccagaactcacctggaagacgctctcaatgaaaatattaagagcgatccatcatggccgaatgaagtccagttattccccataaatactggcggacactggatattagtttcgctacagaaaatagtaaataaaaaaataataaactacaaataaaatgcgtcatattcaactcattgcgtgcactaggccatgatggtaatgactccaacttattgatagtgttttatgttcagataatgcccgatgactttgtcatgcagctccaccgattttgagaacgacagcgacttccgtcccagccgtgccaggtgctgcctcagattcaggttatgccgctcaattcgctgcgtatatcgcttgctgattacgtgcagctttcccttcaggcgggattcatacagcggccagccatccgtcatccatatcaccacgtcaaagggtgacagcaggctcataagacgccccagcgtcgccatagtgcgttcaccgaatacgtgcgcaacaaccgtcttccggagactgtcatacgcgtaaaacagccagcgctggcgcgatttagccccgacatagccccactgttcgtccatttccgcgcagacgatgacgtcactgcccggctgtatgcgcgaggttaccgactgcggcctgagttttttaagtgacgtaaaatcgtgttgaggccaacgcccataatgcgtgcagttgcccggcatccaacgccattcatggccatatcaatgattttctggtgcgtaccgggttgagaagcggtgtaagtgaactgcagttgccatgttttacggcagtgagagcagagatagcgctgatgtccggcagtgcttttgccgttacgcaccaccccgtcagtagctgaacaggagggacagctgatagaaacagaagccactggagcacctcaaaaacaccatcatacactaaatcagtaagttggcagcatcaccggccatgataaagaaaattcacttaagcgtgtcattaatagttttaattctgaactcatgggagaaatgtcgaataataatataaaagttcatttaaatgaaccagagataatatttttacatgccgttcttcagcaatacttaagccaaagttgcggtgcgtttgtgtgcatggcagcccaggaagtgattgaacaaagggaaagcaattctgacagcgccccctatacgttattaaaaaactatgctgacagatttaaaaaatattcagcagaagagcagtacgaaattgattttcaacatcgactggtaaacaggaattgttatttagataaatatggcgatgcaaatatcaatgattattatagagacttagaaataaaacactcacaacgcaaaaatagagcatcaggaaaaagagtaagttaacatcattgttaattaattcgaccagtcagcaaatatgctgactggtcgaacatagtttgctaaacagtcatcactgactgatgtcagtcacaccatccgccagttcaatcttcgggtatttccagcgtatctcggcacgcgattgctggtctgttgatgtagtggattgttgttgctgacttttcttaccctcagagttctgccccctgtcaactcaatctgccaataaataacataattatatttttccttatatgaattcctttttaaaatagcgaagccactgtaaaagatactttttgtatagatctaacaaccgtaataaaacaaacactcataactcattataaataatgataaaataacgtcttttattgataatttatatatggaaaaaaattccttttgttatattgtttctgatttcactccctctgattatttttaccaaccctgggtcactgcattatcgccaacgccccgacacgtcagtcctgagcaattagaaaaaacagttcgttatcttacacaaactgtgcatccacgtaatgccgacaatattgataatctgaataggtccgtagagtatataaaagagttctttgtcagtagcggtgccagagttaccgcgcagagcgtccccgattggctattacgactctgcgcctggtagccaggattacccttacccgcaatgtcctggctttatcccgatcggggggactttattgcctggtcggcagaatacaggatatcaacgccgttcgtcaggtaaaaacggcattgttatcatcccgggatttatctgtttattctatgaatgccccatggtttattcccggtattgatttctctgaccacctgaattattggcaacacgatattcccgccgtaatgattactgacaccgctttttatcgtaataaacaataccacttgcccggtgatacagcagacagattgaattatcagaaaatggctcagatggtgttataaccttgttacacaacagtaaataataaaaatttctcgaggcgggtccagaaacagcgacatgtacattttattttccctcgtctgttttaagatgcgaaacataaaattcaatggaggaaaaataaatgggaatgattggttattttgcagaaattgactcagaaaagattaaccaactgcttgagtctactgaaaaacctttgatggataatatacatgacacgctttcaggattacgccgactggatattgataaacgctgggattttttacactttgggctgacaggcacccctgcttttgatcccgcgaagaatgatccgctgagtcgtgccgtgcttggtgaacacagcctcgaagatggcatagatggcttcctgggattgacctggaatcaggagttagccgcgacaatcgaccgactggaatcactggatcgaagtgagctgcgtaaacagttttccattaagcgactcaatgaaatggagatttatccgggagtgaccttttcagaagagttagaggggcaactctttgcttcgatcatgctgatatggaaaagctgattagcgcgtatcgacgtatgctgcgacaagggaatcatgcgctgacggttattgttgggtgatggtgtcagggcaccaaaaaaaaccgccgaacatgtcggcggctttctgacttacaaactgatagcttacatcagcggcattgctaaccgcacaatgctaatcagcggttgtggccatacacccagcaccagtaccaacagtgcagagatcagcaccacgataccgcctgcgctgtactgccagtttgacggtgcatcgcgacccggttgttccggggcgtgcaggtacaggctcaccgccacgcgcaggtagtagtaaaggccgcttgccgaaccgacaaccacggcgcccaccagccaccacaagtgtgcctggacaccgaccgccagcacgtagaacttaccaataaagcccagcgtcatcggaataccggccagagacagcatcatcaccgtcatcaccgccgcgaggatcgggcgatgccagaacagtccgcggtaagagtacagggaatcagcatccgggccacgatacgggctggacatcaggctgaccacgccgaacgcgccgaggctgctaaacagataaccggccaggtaaacccctaccgcttccatcgacatctcgccagtttgcagcgcaatcagcgccaccagcagatagccgaggtgagagatagatgagtaaccgagcagacgtttgatattggtctggctcagcgccatcaggttaccgaagatgatggaggcaaaggcgataatcgccagcaccacgcgaatcgcttcgctgtcacccatcggtgcgtagaggaacagacgcatcaccacaccgaagatagcgattttgctcgccgtcgccaggaaagtggaaaccggcgcaggcgcgccctggtatacgtctggcgtccacaggtggaacggcaccagagagagtttgaagccgaggccaacaatcatcaggccgaaacctgccagcaacagcggctcgttgagcataccgtcgccaaggtttttacccaacgcgacaaacgacaggtcgccagactgcgcatacaccagcgccataccaaacagcaggaaagaagacgctgcggcagaaaggatggtgtatttgatactggcttccagtgaacgtttctggcggaaagcgtaaccgaccaggccaaacagcggcaaagagatcagttcgataccgaggaacagagacgccagatggttggcattcgccagcaggatcccgcccagcgcggcaattaacaccaacaggtagaactcgtccttgttgtcgttatagccttcaagccacgggtaggcgaaagtacaggtggcgaggctcgccaacaataccagcccggtgtaaagcatggcgaaaccatcaacgcgcatcagcggcgtaacgtccatagcgcctgcctggccgacaaaccagagcgaaaccagcgccgcgttaagcccaataaccgagagcgtagcgttgaggaaatgattgcgtcgccacgcaatggagagcatcacaaccaccaccgtcaagccgacgatcagcaacggtagcagtgcgatcaggttttgtggagttattgtcatggcgatttacggccttgtagtagtaacggaattaacaaaccactgctggatattgccaatcgcggagtgcgaggtatccagaatcggctgcggatagaagccctgcagtaccagcagcaccaccagcaacaggatcataaacagctcacgcagcgacatccctggcagttcctggctggcaatctcgcttttcgctttaccgaagtaagcgcgatgcaacatcgccagcgaataaacagatgcaaagaccagcccaaaggtagagataacggtaatcaccgggacaacctggaagctgccgaacagaatcataaattcgccgacgaagttaccggtgccaggcatcccaagcgttgccaccgcaaagaacagcgacagtgctggcagccatttcatcttgctccacagaccgcccatcatgcgcatgtcgcgggtatggatacgttcataaagctgaccacaaagaataaacagacccgccgccgacaagccgtgcgcaatcatctggattaccgcgccctggtaggccaactggctgccggtgtagatagcaatcagcacgaagcccatgtgggaaaccgaggtgtaggcgatcagacgtttgatatcggtctgggcgaaggccatccacgcaccgtagaagatgccgataacacccagccacatagcaattggcgcgaactctgccgacgcgttcgggaacagcggcagggagaaacgcagcaaaccgtaagcggcagttttcagcaagatccccgcgaggtcaacggaaccggcggtcggagcctgggagtgcgcatccggcagccagccatgcagcggaaccaccggcattttgactgcgaaggcgatgaagaagcccagcattaacaggtattccgcaccactggacattggcgtattcagcagctcttcatagttgaaggtccagacgccggtcgcattgtagtgaacaaaaaccagcgccaggatggcaatcaacatcaccagaccactcgcctgggtgtaaatgaagaacttggttgccgccgtgatacgcgttttaccgtcagaggctttatgcccccacagtgcgatcaggaagtacatcggcaccagcatcatttcccagaagaagaagaacaggaacatgtcgatggcaaggaacacgccgataacgccgcccaggatccacatcaggttgaggtggaagaagccctgatatttttcgatctctttccacgaacatagtaccgccagcacaccgagcagaccggtcagcacgaccatcagcagcgacagcccgtcaatggcgagatgaatagagatacccaaacgcgggatccacggcatgtcgaattcagactgccactgcggaattccggcggattgcgtcagtgaataaccgccctgcaaccacagttgcagcgacagcgccagcgtcaatcccatggtgatcagcgcgatccagcgtggcaccttgacgccaaagcgttcggtctgccagcacaggaagccgccaataaagggaattaatattagccagggtagtaacatggcgatctttattccttgtaaaagtcccgtcaggaccggattttcaacgaattctcacgacagaaaattctcttcggactgggggtagtgtcggatgcaccgcgaaggcggcttatccgacctacgttcttatatgcccaggggcaatcccacaatccttaactcaacgcagtaccatcaacagtgccagcaccacgaccgcaccgatgctcatggatgccacataccagcgcagatagccgttctcacttaacagcagacctttacctgcaaagcgggaaaggacagccggaatgttcatcattgagttcagcggatcgcgtttcagcaaccaggcaatacccaggaacggcctgacgaacactttgtcgtacagccagtcaaagccccaggcgttgtaccaccaggtactcagcaggcggcccggcgcactgttggcgatggaggtcaccagagtacgtttacccagccacagccaagctgccagcagaatgccgacaatcgcgaccacgccagaggtaatttccagggtcaacatgctgccgtgcgccagttccgtcgtttgcggaagcacgccctgcagcggcggtacaatcagtgcgccaacgaaggtggaaaggatcagcagcacaatcagcggcaggctgtgagttacccctttcacggcgtgagcgtgaatttgttcttttccgtggaagacgatgaaaatcatacggaaggtgtagagcgaggtcataaacgcaccgaccagacctgccaccatcagattgatatgaccattcgccatcgcacccgcgaggatctcatccttactgaagaagcccgcagtgaccagcggcagtgccgacagtgctgcgccgcccaccaggaagcagagataaaccagcggaatagatttacgcagaccgcccatcttgaagatgttctgttcgtgatggcaggccagaatgacggaaccggatgccaggaacagcagcgctttaaagaacgcgtgagtcatcaagtggaaaatcgccgcatcccatgcctgcacgccaagcgcgaggaacatgtagccaatctggctcatggtagagtaagcgagaacacgtttgatgtcggtctgtaccagcgcggcaaaaccggccagcagcagcgtaaccgccccgacaatgcccaccagatgcagaatttccggcgtcatcaggaacaggccgtgggtacgggcgatcaggtagacacccgcggttaccatggttgcggcgtggatcagcgcggagacaggcgtcgggcccgccatcgcgtcggcaagccatgtctgcaacggcaactgcgcagatttaccgaccgcaccgcccagcagcatcagcgtcgcccacatcagcatgttattgccgtcagcaaagtgcgctggtgccagttccaccatttcgcggaagttcagggtgcccagttcgttgtaaagaatgaacagtgcgaaagcgaggaaaacgtcacccacacgggtcacgacgaacgctttcattgccgctgcgccattcttcggatcggtgtaatagaaaccgatcagcagataggagcacaggcccacgccttcccagccgaggtacatcagcagcaggttgtcggcaagcaccagaactaccatgctggcgatgaacaggttggtgtaggcgaagaagcgagagtagccctcttcaccgcgcatgtaccaggaggcgtacatgtgaataaggaaacccacaccagtgaccaccgagagcatggtcagcgacaggccgtccagcaccaggttaaaaccgatgttaaagtcgcctaccgacatccacgtccacagcggctggctgtatgcctgctcgccgttagcgaagaaatcaacgccgataaaggcggttaccagcgccgccaggcccacagagccaacgccgacgatcgccgaaacgttttcagaccagcgcccacgggagaacgccagcaggacgaagccaatcaatggcaaaataatggttaaggcaagcatgttcatccgcgcatctcacttactgaatcgatgttcaggttctggcgacgacggtgaagttgcagcagcagcgcaaggccgatactcgcttctgccgccgcgaggctgatggcgagaatgtacatcacctgaccgtcggtctgaccccagtagcttccggcgacaacaaaggccagcgcggaggcgttaatcatgatttccagaccaatcagcataaacagcagattgcgacggataaccagaccggttaagccaagaatgaataagattgccgcgaggatcagtccatgttgtaaggggatcatgcgtgctcctccgtttttcttttcgcgctgtcgtctttacgattgctcagcacttcacccgcacgctcttcacgaccgacgtggaaggccacaaccagacctgcgagcagcagcatagaagccagttccaccgccagtacgtaaggcccgaacagcgtaatacccactgctttagcactgattggcgtaccgtcgataccctgatcgttaacaccgaggatggcgtaaacaatcaccaccagcatgatggccgacaaaattgccggaccaatccacacctgcggtttcagccactggcgttcctgttcgatttctgaaccgcccaggttgagcatcatcaccacgaacacgaacagcaccataatggcacccgcgtagacgataatttccagcgcaccggcgaagtaagcgcccagtgagaagaacaccccggaaatcgccagcagcgaaataatcaggtacagcagtgcgtgtaccggattggtatgggtgatcactcgcaaggtcgcaagtatggctatcaggccacagatataaaaagcgaactccattgcccctctccttacggtaacaggctcttgacgtcgataggcttggcttcgttctctgcttcgcccttatctttgccgtcgattgccatacctgccatccggtagaagttatattccgggtatttgcccggaccggagatcagcagatcctctttttcgtaaaccagatcctggcgcttgtattcccccatttcgaaatccggggttaactgaatcgccgtggtcggacaggcttcttcgcacagaccacagaaaatgcagcgtgagaagttgatgcggaaaaattccggataccagcgaccgtctttggtttctgctttttgcagcgagatacagccgaccgggcaggctaccgcgcagaggttacaggctacgcaacgctcttcgccgtccgggtcgcgggtcagaacgatacgaccacgataacggggcggcagatagatcggctcttccgggtacattcgcgtttcgcgtttggcgaacgcgtgcaggccgatcatccagatactacgaacctgggtgccgaaacctactaacaattcttttaaggtcatggtcttattgccccttattgcgcctgccagagaatgacagccgccgttaccagcaagttgatcagcgtcagcggcaggcagattttccagccgaaggacattacctggtcataacgcggacgcggtaacgacgcacgaatcaaaatgaacatcatcataaagaacgcggttttcagcgcgaaccagatgaatggcggtaacaacgggccttgccagccaccgaagaacagcgtcaccatcaatgcagagatggtcacaatcccgatgtactcacccacgaagaacagaccgaacttcataccggaatattcaatgtggtaaccatccgccagttcctgctcggcttccggctggtcaaacgggtgacggtgacataccgccacgcccgcgatggcaaaggtaataaaaccaaagaattgcgggataacgttccacacatgcgcctggctgttgacgatgtcggtcatgttgaatgaaccggcctgcgccaccacgcccatcagggaaagcccgaggaacacttcgtagctcagggtctgcgcagaagcacgcatcgcacccagcaacgagtatttgttgttacttgaccagcccgcaaacagcaccgcgtaaaccgccagacctgccatcatcaggaagaacaaaatcccgatgttcaggtcggcaaccacccaacccggactgactggcacaatcgcaaaggccagcagcagcgaggtaaaggcaatcatcggtgccagggtaaagatgacgcgatccgagaatttcgggatccagtcttctttaaagaacattttgatcatgtccgcaaccagctggagcgaaccgccccagccaacacggttaggtccgtaacggttctggaacagacccagcaggcgacgttcgccaaagctcatgaatgccccgcaggtgacaaccaccagcaggatcaccaccgctttgaggatggtcagcaggatctcaatcagttccggtgatatccaactcattgttgtgcctccttgagatcctcaagatgcgcgccagccagcaccggagcaataccggacatacccatcggcaagcccacctgccctgccgtcagcccttcagcgatttcaaccggcagcgtgaccgtattgccatcgtaactaaaggagacgtgtgtacctgcgttcacacctaacttcgcggcatccgctgggttgagtttgatgtacggctgcggcatacggctctggaagaccggagcacgctgtgacaattcatcgctgccaaacaggtggtaatacggcgcgatacgccatttcccgtcctgcggctggaagcgtgccggtacgctggtgaagtaatccagaccattttcgctggtttcaaacagacgcacgcccggatcgccaaagcgcagtttgccgcccacttcgtcctggaatttgttccacgcctgcggggagttccagcccggcgcccaggcaaacggcacttgcgaacggtgcgcagtcggctggttgttaccttccatcgagaaggtgaacatggtgtcaatatcctgcggctgacgcggctcatgaacgctgatattggcgcgcatggcggtacgaccgctgtaacggtgcggttcacgggccagtttctgcccacgaatacggaatgtcgcatccggcgcagcatctttgatacctgccagttccgggattttcgccacaacagcgtcaatcacatggtcgagctgcgtccagtccacttcacggctcagcagggtgctgtgcagcgagtgtaaccagcgccagctttccagcatgacagttttgctgtcgtaataagcaggatcgtaaacctggaagaaacgttgggcgcggccttcgttgttgatcaccgtaccgtcgctttcagcaaaactggcagcagaaagtaccagatgggcgttttccataatcgctgtgcgttgatgatcaaccaccatcaccagcggcgctttagccagcgcagcattcacgcgggtagcggaagcgtgacgatgcagatcgttttccagcaccaccaccgcgtcggcgcgtccggtttccagttcggtcaacgcttcttcaagcgaaccgccacccataatgcccagccccatgctgttgacggaacgggcaatcatggtgataccaacgtcagcgccgcgacctttcagggctttcgcgacgttagccgcagcctgaatcacctctatgctaccggcgttcgtcccggagataatcaacggtttcttcgcacctgccagtgcctgcacgatgacgtcgattttgctttgcagctcaggttcgataccgtcaaccgctggcgcagagttatccagcgcatgggcgatggcaaaacctaaacgcgcctgatcttcaaccggtgcgcggtaagtccacgccgcgatatcatccagacgggtgtcatcaacgttggtaacaaacagcggatgcttcgcacgttgaccgatgttgaggattgccgcaatctgccagtcagccactttctgtgctgccgccatttcgcgcgctttacctttcacagcctgacgcactgccagcgcgacgcgcgcgccggtctgggtaacgtcttcgcccagcaccagtaccgcatcgtaagattcgatttcgcgcagagccggagtataaatgccgccttcacgcagcactttcagcgccagttgcagacgttcctgctcaccgtgagcgataccggtgtagaagttttcttcgcccaccagttcacgcagcgcaaagttgctttccacgctggcacgcggagaaccaataccgatcactttcttcgactgacgcagaatatctgccgcgccctgcattgcctgttcggcgttgagggtaatgaaatcatcgccacgacgctgtactggctgacgcggacgatccttcaggttgacgtaaccgtaaccgaaacgaccacggtcgcagaggaagtagtggtttaccgtaccgttgtaacggttttcgatacgacgcagttcgccgtaacgttcaccggggctgatgttacagccgatggaacattgctggcagatgctcggcgcaaactgcatatcccatttacggttgtaacgctcggagtgcgttttgtcggtaaatacgccggtcgggcaaatttcgaccaggttaccggaaaattcgctttccagcgtgccgtcttccgggcgaccgaagtagacgttgtcgtgcgcaccgtaaacgcccagatctgtaccgtcagcgtaatctttgtagtaacgcacacagcggtagcaggcgatgcagcggttcatttcgtgagagatgaatggccccaaatcctgattacggtgggtacgtttggtgaaacggtagcgacggaagctgtgtccggtcatcacagtcatatcctgaagatggcagttaccgccttcttcacataccggacagtcgtgcgggtggttggtcattaaccactcgaccacactttcacggaactgtttcgcttcttcgtcgtcaatggaaataaaggtgccatcggaagccggtgtcatacaggacatcaccaggcgaccacgcgtgtcttccgcgttttggtattgcttcaccgcacactggcggcaagcaccgacgcttcccagcgccggatgccagcaaaagtaaggaatatcaaggcccagagacagacaagcttccagcaggttgtccgctccgttgacctcgtattctttgccgtctacatgaattgtagccattagcatgcttccagttttctcggtcagggaccgagcgttaatcgaaattcggttaccagcgctctttcagcaggttcggctgaatcccattaatcaaatgggtattgctgaacggctgtttgattcccgcctcaaattcttcgcggaaatatttgatggcgctctgtaacggctccactgcaccaggtgcgtgggcacagaaagttttacccgggcctaagaatcgacacagttgctcaagtgtttcgatatcgcccggctggccttcgccacgctccagcgcacgcagaattttcacgctccacggcagaccgtcgcggcacggcgtacaccagccgcaggactcacgggcgaaaaactcttccaggttacgcaccagcgacaccatgttgatctcatggtcaaccgccatcgccagcgccgtacccagacggctgcccgctttaccgatactttcgaattccatcggcagatcaaggtgcgcttcggtcaggaagtcagtccccgcgccgcctggctgccaggctttaaatttcagaccatcacgcataccaccggcgtaatcttcgaggatctcgcgtgcggtggtgccgaacggcagttcccacagtcccggatttttcacccgaccggagaagcccatcagcttggtgccagcatctttacttttcgagatgttctgataccactccacgccgttagcgaggatcgccggaacgttacacagggtttcgacgttgttgacacaggtcggtttgccccatacgccggaggttgccgggaaggggggtttcgagcgtgggttagcacgacgcccttccagggagttgattaacgctgtttcttccccgcagatgtagcgccctgccccggtatggacgaacagttcgaagtcgaaacctgttcccataatgtttttgccaagcaagcccgcttcagtggcttcggcaatggcgcggcgcagatttactgccgcttcgatatattcgccacgcaggaagatgtagccacggtaagctttcagcgcaaacgcggagatgagcataccttccaccagcaggtgcggcagttgctccatcaacaggcggtctttataggtgcccggctccatttcatcggcgttacacagcaggtaacggatgttcatggattcgtctttcggcatcaggctccacttcaggccagtcgaaaagcccgctccgccgcgccctttcagaccagcgtcttttacctgattaacgatttcgtccggagacagcccggtcagcgccttacgcgccccttcgtaaccgtttttgctgcggtattcgtccagccacactggctgtttgtcatcgcgcagacgccaggtcagcggatgcgtttcgggagtacggataatgtttttcatttataccgctccagcagttcagggatcgcttccggggtcagatgcgcgtgagtgtcctcatcgatcatcatgtttggccctttatcacagttccccaggcagcaagttggcagcagcgtaaagcggccatcaaatgtcgtttgccctggtttgatgttcagctttttctcgagcgccgcctgaataccctgatacccgttgatatgacagaccacgctgtcgcaataacggatcacatggcgaccaaccggctggcggaagatctgactgtagaacgttgccacaccttcgacgtcgcttgccggaatacccagcacatcggcgatcgcgtggatcgcaccatccggcacccagccacgctgcttctgaacgattttcagcgcttcaatggacgccgcacgcgggtcttcgtagtggtgcatctcgtgctcaatcgcttcacgctctgccgcactcagctcaaaagcctcggtttgtggttgttgattctcgtgcataattagcggtccacatctgacataacaaaatcgatactgcccagataaacaatcaggtcagacaccaggctgccgcggatcgccgccggaatttgctgcaaatgcgcataactcggcgtgcggatacgagtgcgataactcatggtgctaccgtcgctggtcaggtagtaactgttgatccccttggtcgcctcaatcatctggaaagattcattggcaggcatcaccggcccccacgacacttgcaggaagtgggtgatcagggtttcgatatgttgcagcgtgcgctctttcggcggcggcgtggtcagcgggtgatccgctttgaacgggccttccggcatgttgttgaggcactgctcaagaatgcgcagactctggcgcagctcttccactttcagcattacgcgggtgtagcagtcagaaacaccaccaccaaccgggatttcaaagtcgaagttttcatagccagaataaggacgcgccttacgcacgtcgaagtcgatcccggtagcacgcaggcccgcgccagtggtgccccactccagcgcctctttcgcgccataggcggcaacgccctgggaacgacctttcagaatggtattttgcagcgccgctttctcgtaagacgccagacgtttcggcatccagtcgaggaactcacgcagcaggcgatcccagccgcgcggcaggtcgtgcgctacgccgccaatacggaaccacgccgggtgcatacggaaacccgtgatcgcttccaccagatcgtaaattttctgacgatcggtaaaggcgaagaacacgggcgtcattgcgccgacgtcctgaataaaggtcgagatgtacagcaggtggctgttgatacggaacagttcggagagcataacgcgaatgacgttaacgcgatccggcacggtgatcccggccagtttctctaccgccagcacgtaaggcatttcgttaacgcagccgccgaggtattcaatacggtcggtatacggaatgtagctgtgccaggactggcgctcgcccattttctccgcaccacggtggtggtagccgatgtctggtacgcagtcgacaatctcttcgccgtcgagttgtaaaacgatacggaaagccccgtgcgccgacgggtggttcggaccgaggttgaggaacatgaagtcctcgttttcggtgccgcgcttcatcccccactcttccggtttgaaggtcagggcttccatctccagatcctgtttggctttggtcagctcaaacggcgagaattcggtagcgcgcgccgggtaatctttacgcagcgggtgacctttccaggtttgcggcatcatgatgcggcgcaggttcgggtgaccgtcgaaagtaatgccaaacagatcccaggtttcacgctcataccagttagcgttcgggaacagtttggtgaaggtcggtacgtgcaggtcgttttctgccagcgccaccttcagcatgatgtcgcggttacgatcgatagaaatcagatggtagaaaacggaaaaatccgcggcaggtaacccttcgcggtgtgtgcgcagacgttcgtccatgccgtgtaagtcaaacagcatgacgtaaggtttcggcagtttctttaagaaatcgccaacttccagtaattgttcacgcttgatccacacaacgggaaccccggtgcgagtcgcctgaacagtaaaggcatccggcccaaaacggttgcgcagttcgccaatcaccggatcatcaagatgatcacgggtctgccaggcgggttcttgcgcggttaagtcggtcatattgttcaccattgcaaatggtccgtggtgactgtcggcgcagtaagcttcgcgaaatagatttaggaataagcgaagaaaaatccctttgccgacaggcgcaaattaaatctcgtcaggtgtacgcaggttggttacggcaatgcgttcaccgcgcttgcgttcgcgctctgattgcatattggcgcgataaacgccctgatcgccaaccacccaggagagcggacgacgttctttgccgatagattcctgcaacagcatcagtgcctgcatgtacgcttcaggacgcggcgggcagcccgggatatacacatcaaccgggatgaatttatcgacgccctgcacaacggaataaatatcgtacataccaccagagttggcacaggcacccattgagataacccattttggttccagcatctggtcatacagacgctgaataaccggtgccattttggtaaagcaggttcctgcaaccaccatcaggtcagcctgacgcggcgaagcacgcaatacttctgcgccaaaacgcgccacgtcatgcaccgcggtaaacgaagtcaccatctcaacgtaacagcaggaaagaccgaagttatacggccaaattgagtttttacgaccccagttaaccatgtcattgagcttgcccataaacacgtttttgttaacttcttgctccagagggtcggttacgatctcctgcttttgcagggggtaacggtcgttctcaccgttgggatctatgcgggtgagcgtataatccatcttaatgcctcgcggttagcgttgacgattagcgatactgttcgtttccgggttcatacgctcgcggcgtgaacgcgcgggcgtccagtccagcgcgccaatacgcaccagataaaccagacctgccagtaacacaaaaataaaaattgcagcttccacaaagcctacccagccgctttcgcggatagaggttgaccatgcgaacagatacagcgcttcaacgtcgaagataacgaagaacatggccaccagataaaacttggcggacaggcgtaagcgggcggagccgaccgagtcgataccggattcaaacggcacgtttttcgacctcgcgcgtgcgcgaccgcctaaaaaccaaccgcctaccagcatcaggcaacacaggccaatggcaacgataagaaagatagcgaatgcccagtgatgagcgatgacttcagtggatgttgacatactcattgcttactcatcaaaagtagcgccagattcactgctcttcacggcagatggacgccacatcgattcatggggaggaataaaaaaaaccttacaatcactgtagaaattcttttatacagctaattgatgtggtcttttactcctttctataaccttttgtcaactttaacaaaagtttcttcacattagtttacataatatcaacaccattagcatttaatgccctttcacgccagatccttgacgactccaggataattagatgttgttgaatcgtgtccgttgtgaagcaatggaaaaaatacgggtctattttgacaggaatttgtgtcgattcctccccccaaaagagagtattttcttgatctgtgacacgcttttgtcattccataacaaaaacgcagcaacaaatttacgtatttttaacatcattgtagcaggtgatttttttcaggcgattatttgtgcgttcgggacgtgaatctctggtgattgaaaaatgaacagttttgtacgttctgcactatgcgaggaaggatttttactaaaaaaaagccgctggggtttaaaacacccccagcggctcgtttttacactattgtctcaggaattatctatcgtccgtcgattactcgatatccctttcaatcaacaatgaatcatccccttccggagcagacattgggctgtattgccacggattatggtagctctccatcgcctgatagatcacctgggccagctcattattactggacgggtcatagcacagcaaatattcggtatcaggtagcggcggtaagccatctactccactcagcacacgcaggtccgggctcatcatttcaatcggccttgccgtcacgccaagaccggctttcactgccgcacgaacggccggaagcgtcgaggcgacataagccagtcgccatggaatatctgctttattaagcgtcgccagcaccatatcgcgaaacggacttggatcatccagcaatacaagagggatcggctcgcctttttgcaatacgtattccgctgcgcagtaccagtgtgttggcgaggtacgcaggttcaatgccttaaacgctgaaggacgatgggtggttaccatcaaatccacttcctgggattccagcatttctgccatataggcattacgtttaacgcggacatccagcgctaatttcggataaaccgaactcacgcgatttaacaggaaaggtaagatcgtatcggcagattcatctgaagcaccgatagttaacacgccctgaagattactgaacattaatgatgagcaggcctcatcattaaaacgcagtattttcctggcgtaaccaagaagttgaatgccatgttcagttaacagtttgttgcgaccgtgacgagcgaacagttctttcccaacgagttgttccagacgctgcatttgctgacttacggcggactgagtacgacacacagcggcagctgcggcagcaaaagtgttcagatcggcaacagcaacaaatgttctcagcagatcgaggtcgaggttaattatcggacgatttgcacttatcatatattatcacttactggcggctcatactgagctggttaatgctgtgcacacacaaacaagcaattccatttgtaatgtgcctccctggcagtttcatccggaacccggacgaaagtaaaaatgcatatgagttgcactaaaaaagcgactcacattgttccgttataatgcctgaagtagatcacagaatatatcttcagggatcgcatatctattaagttactcactcttttctatttatgacatgcgcgtgtttgtataaatgtaaatgtgagtccttgttccactctcgtgcagcatcgctggtcatacgcgaacacgtacaaacagcaatggtgaggcggcatcaagagcagggatccgtcatttatgcgagcattttaccccaaaaaccttttatttataagggtcattgcgaattatctgatgcaaagttatgttatgttaggcaaagtaatcttctattattaataagcacatcaaaacctttttgaatattaaataataattaattagcatcatcctcattcattaattccgcttaacaatagtttcacaccttgcccccattgcgacacctcggaaatcatcacgctgttaaactctccgtaatgcggaaatatcatcatcgcgtttcattagtgaattcttaaatgaggcattttcacacaattatcttacagataaaaaaaccagacttgcaattaagaatcagaacaattcactatataacattgcatgcaaagcatatacacctcattattttgtcattattaagttattaacagcacaatcgagccttcccctctggcaaaatcttattctgcagaccttcaaaacaccgtcctgggggagtacattgttctaagctgacttccacggcagggagtggcgataacagcaaaaaaggtcaagattcatgtcccccattgaaaaatccagcaaattagagaatgtctgttatgacatccgtggtccggtgctgaaagaagcaaaacgcctggaagaagaaggtaacaaggtactgaaactgaacatcggcaacccagccccattcggttttgacgcgccagatgaaatcctcgttgacgtgatacgcaacctgcctaccgctcaagggtattgcgattccaaagggctttactccgcgcgtaaagccatcatgcagcactaccaggctcgtggcatgcgtgatgttaccgtggaagatatttacatcggcaatggtgtatcggagcttatcgttcaggcaatgcaggcattgctgaacagcggggacgaaatgttggttcctgcaccagattacccactctggaccgcggcggtttcgctttccagcggtaaagcggtgcattatctttgcgatgaatcctctgactggttcccggacctcgatgatattcgcgctaaaattacgcctcgtacgcgtgggatcgttattatcaacccaaataacccaaccggcgcggtatattccaaagagcttttaatggagattgtggagattgcacgtcagcataatctcattatcttcgccgatgaaatttatgacaaaattctctacgacgatgctgagcatcactcaattgcgccactggcacctgacctgctgaccattacctttaacggactgtcgaaaacgtaccgcgttgcaggcttccgtcaggggtggatggtgttgaacgggccgaaaaaacacgccaaaggctacatcgaaggtctggaaatgctggcttcaatgcgcctgtgtgctaacgttcctgcgcaacacgccattcagaccgcgctgggtggttatcagagcatcagtgaatttattacccctggcggtcgtctttatgagcagcgtaaccgcgcgtgggaactgatcaacgatattccgggcgtttcctgcgtgaaacctcgtggtgcgctgtatatgttcccgaaaatcgacgccaaacgctttaacattcacgacgatcagaaaatggtgctggatttcctgttgcaggaaaaagttctgttggtgcaagggacggcattcaactggccgtggccggatcacttccgcattgtcacgctaccgcgtgtcgatgatatcgagctgtctttgagcaagttcgcgcgtttcctttctggttatcatcagctgtaatcttaatttcactgccggagattgcatccggcagcgttatcccgccacaatgacctgatgatgtcatcatacgtaaggtcactatgaaacagagccatttttttgcccatctctcccgcctgaaactcattaaccgctggccgctaatgcgcaacgtgcggacggaaaatgtgtccgaacacagtttgcaggtagcgatggtcgcccatgcgctggcagctatcaaaaatcgaaaatttggcggtaatgtcaacgccgaacgtatcgctttactggcgatgtaccacgatgcctcagaagtgctcaccggcgatctccctactccggtgaaatacttcaattcgcaaatcgctcaggagtacaaggctattgaaaaaatcgctcagcaaaaactggtcgatatggttccggaagagctgcgggatatctttgcgccgttaattgacgagcatgcatatagcgatgaagaaaaatcgctggtgaaacaggcagatgcactgtgtgcatatctgaaatgtctggaagaactcgcggccggaaataatgaattcttgctggcaaaaacgcgactggaagcgacgcttgaagcgcgtcgcagccaggagatggactacttcatggaagtatttgttcccagcttccatctttcgctcgatgagattagccaggattcaccgctgtaagcagccggagtctgcgtcgcatcaggcaataagcgccggatgcgacatcaggctcttgtcaaaacggaaacagcatcgggatcatcaccacacaaaccgccatcacgataatggtgaacggtacccccaacttcacaaagtcactgaagctgtaatttcccggacctaaaaccagtgtgttaacaggtgaagaaaccggtgtcataaaggcggcggatgctgccatcgccacgaccatcgcgaatggataaggcgacacccccatcgttttggcagcagccagcgcaatcggagccatcaacaccgccgtcgcggtattagagataaatagcccaataaccgccgacaagacaaacaaacaccccagcatcatatgtggcccgtaaccaccgccaatgtccatcagccctttcaccgccagcgcgacacctcccgttttctgtaatgccacagcaaacggcatcatcccaacgatcaaaataatgctcggccagtgaatggatttataggcgctttcagcatctatacagcggaatttccccatcagcaggcaggcgatgatagcggcaacaggattaggaatttcatctgtcagcattaacgccaccattagcaccagacagaaaatggcatggggtgcctggctgtgcgcgggcgatgcttcactcacctcttccggtaagttcagcgctacgaagtcgcggccctgtttggccagcataccgatcagtttccagttacccacaaccaggatgatatcgcccagcagcagaggctcatccgccagcgaaccttccagcgccacgccattgcgctttagccccaccacattcagtccgtagcgggtacgaaaaccaatttcgcgcaccgatttaccaatcagttctgactcaggaattaatgaaatctctgccatgcccacatcaagggcctggtcagaaaaatactcgccgcgcagtaccatcggctccagcaattgctcactacaaaattgccggagatcgacatcagccgcagacatatcaataagcaaaacgtcacgcgcgcgaaattcagaaaccccattaacgttcacgataacgcgacgaaaacgccgccagcgttcaacaccgatgacgttagcgccataacgctcacgtaatttgagatcatccagccgttgaccaatcattggcgatccggggcgaatagccagacgtcgcgcacgcccggtcagtcgatattcacggataagatcgcgaaaggttcgacgcgtccagccttcgcgctgcggggtctgggtatcccctttcagcatgaaacgcatcactaacatatacaaaatacccagcaccagcacgaccaggccaataggtgttacgctaaagaaactgaagccgtgatagccttcacgcagcaattcactgttgactaccaggttcggcggcgtcgccaccagcgtcatcatgccgcttatcagcccggcaaaactcaacggcatcatcagacgtgacggcgaagtttgcatacgcatggcaacgcttaacaccacgggaataaagatagcgacaacgccggttgaactcataaacgcgccaagccccgcgacggtcagcatcaacaaaaccaacattttgatttcactgttgcccgcaactttgaccagccatgttcccattacggtggcaacaccggtacggaccaaaccatcgccaataataaacaaggcggcaatcaggacaacgttaggatcagaaaagccggaaaatacttcggggactgtcagcgttccgcttaatgcaaacgcgacaataacaaacaaagcgaccgcatccatacgcactctgcccgtcgcaaacaagacaatggcaacggccagtaatgaaagaacccaaatcaattcaccgttcacaacttatccttgttaattgagggagatgtcttgattctgccataaaaaagccccgacgagacggggctaaatcatgatcaggtgtttcactgaataataacatcgccatttggctgtttggtcacagtaatttgctccagactgtggaggaccaaatcgacctcattcaggcgcggggtatctgccggagcgttaaccgcaatgacatgacaacccgccgccaggccagaaagcacgccagcggagcatcttccaccaccacacactcctgcggcgcaagccccagcagctgcgcgcctaacagatacgcatcaggttctggttttccgcgcttcactcgctcagcggttacaaacacctctggtgcgggaagcccagctattttatggcgcgctcgcgctaccggcatggagccagaagtcacaatggcccacggaatacctgctttattcaaatgactgagtaaggcgattgcccccggaagcgggtaataccttcggtttccgtggcctcgatgtgctccagacgcgtaaactcggcggcaatatcagcctcggatttgcccgccataaaatggcgcagagaggtgatcgcctgtttaccgtgaatgaaagccagcacctcttccggcgctaacccatgacgtctggcccagttgctccacgcccgttctaccgcaggcagggaatccaccagcgttccatcaagatcaaacagaaaacctttgcaccgcacgcgggcctcctcaggcattgataatttgattaatttcgttggcgctcaaatggtactgacgcgggcaggcatgccacacattaagcatgcgctgatatttttcccacattggcgtctgggcgttaaaaccgtgagttccggcgtcaaaatgggtatagcgcccttccacattaaccataaagcggacataaccgaggtaacgtgcttcagtggcggcgtcaaagccgaggaaggtgacacgacgttcatcgatggattgctggtcctgcaaattagaccaggaaacatgcaacgcatgatacatctccataatgtcgatgatagtgcggcaggtttcttctttcagctcgccaaactcgcgatccaattcacgcatctgtaatccgtaacctcgctcaataattgtttgcaggcgacggtaacgttcagcatttgccggatcgagcatagtcatcatcttgtactgattagacaaaataagacgttgcgcgttggtcatttccattgttgactcctgtatcactctactacggtgaaaaaaaagaaggctgagtatgccttcttttatatgcgtaatcaggggtcaattacaaatcatcaaggaaagttttatccagttgtttgaaggcgcgcttaagcgtgtcagctaatgcctggtaatcaggcttgccttcaacgggtgccaacacctgtccagactcctgcaatttaccgcgaacttcataaaaccagttaaggattgcagggggtaatggcgttacagaacgcttgcccagccaccacaatccctgcatgggtaaacttaaggcgaacagtgcagtggcaactgccggcccaagctgaccgcccagggcaatctgccagcagagagtaaatacggcgatcggcggcataaaacggatcgcataacgcgtcatcttgataacgcgattttcgacaaagaccggggcaaggcgtttttccagtggccacgtctttgagtaatgctgtccgcggcgaaacaagctaaaaaaattaacagaacgattatccggcgttgacatgcttcacctcaacttcacatataaagattcaaaaatttgtgcaaattcacaactcagcgggacaacgttcaaaacattttgtcttccatacccactatcaggtatcctttagcagcctgaaggcctaagtagtacatattcattgagtcgtcaaattcatatacattatgccattggctgaaaattacgcaaaatggcatagactcaagatatttcttccatcatgcaaaaaaaatttgcagtgcatgatgttaatcataaatgtcggtgtcatcatgcgctacgctctatggctccctgacgtttttttagccacgtatcaattataggtacttccatgtcgagtaagttagtactggttctgaactgcggtagttcttcactgaaatttgccatcatcgatgcagtaaatggtgaagagtacctttctggtttagccgaatgtttccacctgcctgaagcacgtatcaaatggaaaatggacggcaataaacaggaagcggctttaggtgcaggcgccgctcacagcgaagcgctcaactttatcgttaatactattctggcacaaaaaccagaactgtctgcgcagctgactgctatcggtcaccgtatcgtacacggcggcgaaaagtataccagctccgtagtgatcgatgagtctgttattcagggtatcaaagatgcagcttcttttgcaccgctgcacaacccggctcacctgatcggtatcgaagaagctctgaaatctttcccacagctgaaagacaaaaacgttgctgtatttgacaccgcgttccaccagactatgccggaagagtcttacctctacgccctgccttacaacctgtacaaagagcacggcatccgtcgttacggcgcgcacggcaccagccacttctatgtaacccaggaagcggcaaaaatgctgaacaaaccggtagaagaactgaacatcatcacctgccacctgggcaacggtggttccgtttctgctatccgcaacggtaaatgcgttgacacctctatgggcctgaccccgctggaaggtctggtcatgggtacccgttctggtgatatcgatccggcgatcatcttccacctgcacgacaccctgggcatgagcgttgacgcaatcaacaaactgctgaccaaagagtctggcctgctgggtctgaccgaagtgaccagcgactgccgctatgttgaagacaactacgcgacgaaagaagacgcgaagcgcgcaatggacgtttactgccaccgcctggcgaaatacatcggtgcctacactgcgctgatggatggtcgtctggacgctgttgtattcactggtggtatcggtgaaaatgccgcgatggttcgtgaactgtctctgggcaaactgggcgtgctgggctttgaagttgatcatgaacgcaacctggctgcacgtttcggcaaatctggtttcatcaacaaagaaggtacccgtcctgcggtggttatcccaaccaacgaagaactggttatcgcgcaagacgcgagccgcctgactgcctgatttcacaccgccagctcagctggcggtgctgttttgtaacccgccaaatcggcggtaacgaaagaggataaaccgtgtcccgtattattatgctgatccctaccggaaccagcgtcggtctgaccagcgtcagccttggcgtgatccgtgcaatggaacgcaaaggcgttcgtctgagcgttttcaaacctatcgctcagccgcgtaccggtggcgatgcgcccgatcagactacgactatcgtgcgtgcgaactcttccaccacgacggccgctgaaccgctgaaaatgagctacgttgaaggtctgctttccagcaatcagaaagatgtgctgatggaagagatcgtcgcaaactaccacgctaacaccaaagacgctgaagtcgttctggttgaaggtctggtcccgacacgtaagcaccagtttgcccagtctctgaactacgaaatcgctaaaacgctgaatgcggaaatcgtcttcgttatgtctcagggcactgacaccccggaacagctgaaagagcgtatcgaactgacccgcaacagcttcggcggtgccaaaaacaccaacatcaccggcgttatcgttaacaaactgaacgcaccggttgatgaacagggtcgtactcgcccggatctgtccgagattttcgacgactcttccaaagctaaagtaaacaatgttgatccggcgaagctgcaagaatccagccctctgccggttctcggcgctgtgccgtggagctttgacctgatcgcgactcgtgcgatcgatatggctcgccacctgaatgcgaccatcatcaacgaaggcgacatcaatactcgccgcgttaaatccgtcactttctgcgcacgcagcattccgcacatgctggagcacttccgtgccggttctctgctggtgacttccgcagaccgtcctgacgtgctggtggccgcttgcctggcagccatgaacggcgtagaaatcggtgccctgctgctgactggcggctacgaaatggacgcgcgcatttctaaactgtgcgaacgtgctttcgctaccggcctgccggtatttatggtgaacaccaacacctggcagacctctctgagcctgcagagcttcaacctggaagttccggttgacgatcacgaacgtatcgagaaagttcaggaatacgttgctaactacatcaacgctgactggatcgaatctctgactgccacttctgagcgcagccgtcgtctgtctccgcctgcgttccgttatcagctgactgaacttgcgcgcaaagcgggcaaacgtatcgtactgccggaaggtgacgaaccgcgtaccgttaaagcagccgctatctgtgctgaacgtggtatcgcaacttgcgtactgctgggtaatccggcagagatcaaccgtgttgcagcgtctcagggtgtagaactgggtgcagggattgaaatcgttgatccagaagtggttcgcgaaagctatgttggtcgtctggtcgaactgcgtaagaacaaaggcatgaccgaaaccgttgcccgcgaacagctggaagacaacgtggtgctcggtacgctgatgctggaacaggatgaagttgatggtctggtttccggtgctgttcacactaccgcaaacaccatccgtccgccgctgcagctgatcaaaactgcaccgggcagctccctggtatcttccgtgttcttcatgctgctgccggaacaggtttacgtttacggtgactgtgcgatcaacccggatccgaccgctgaacagctggcagaaatcgcgattcagtccgctgattccgctgcggccttcggtatcgaaccgcgcgttgctatgctctcctactccaccggtacttctggtgcaggtagcgacgtagaaaaagttcgcgaagcaactcgtctggcgcaggaaaaacgtcctgacctgatgatcgacggtccgctgcagtacgacgctgcggtaatggctgacgttgcgaaatccaaagcgccgaactctccggttgcaggtcgcgctaccgtgtttatcttcccggatctgaacaccggtaacaccacctacaaagcggtacagcgttctgccgacctgatctccatcgggccgatgctgcagggtatgcgcaagccggttaacgacctgtcccgtggcgcactggttgacgatatcgtctacaccatcgcgctgactgcgattcagtctgcacagcagcagtaacctcgtcatcatccgcagctttgcgctgcggatatctgaaccggaaataatcactatttccggttttttattctcttaatctgcattaatcctttctgattatcttgcttaactgcgctgcatcaatgaattgcgccatttcactttacatacttaccactttgttttgtgcaagggaatatttgcgctatgtccgcaatcactgaatccaaaccaacaagaagatgggcaatgcccgatacgttggtgattatcttttttgttgctattttaaccagccttgccacctgggtagttccggtggggatgtttgacagtcaggaagtgcagtatcaggttgatggtcaaacaaaaacacgcaaagtcgtagatccacactcatttcgcattctgactaacgaagcaggcgaacctgagtatcaccgcgtacagctgttcacgacgggcgatgaacgcccgggcctgatgaacttcccgtttgaaggattaacctcaggatcgaaatacgggacagctgttggcatcatcatgtttatgctggtgattggcggcgcgtttggcattgtgatgcgtacaggaaccattgataacggtatcctggcgcttattcgccatacccgcgggaatgaaattctctttattcctgcgctgtttattctgttttcacttggcggcgcggtatttggtatgggagaagaggccgtcgcctttgccattatcatcgcaccgctaatggtccggctgggctatgacagtattaccaccgtcctggtgacctatattgccacgcaaatcggttttgccagttcgtggatgaacccgttttgtgtggtcgttgctcaggggattgccggcgttccggtgctttctggctccgggttgcgcatcgtggtgtgggttatcgccactatgattggcctgatctttaccatggtgtacgcctcacgagtgaaaaagaatcctcttctgtcacgcgtgcatgagtccgaccgcttctttcgtgaaaagcaggcggatgttgaacaacgtccgtttacctttggtgactggctggtattgattgtcctgaccgccgtaatggtctgggtgatttggggcgtgatcgttaatgcctggtttattccagaaattgccagccagttcttcaccatgggtctggtgattggcatcatcggcgttgttttccgccttaacggcatgacggttaataccatggcttcatcctttaccgaaggggcgcgaatgatgatcgcccctgccctgctggtgggtttcgccaaagggattttgctgctggtcggtaatggtgaagcgggtgatgccagcgtgttaaataccatcctcaacagcattgccaatgccattagcggtctggacaacgcggtcgcggcctggtttatgttgctcttccaggcggtatttaatttcttcgtgacgtccggttctggtcaggcggcgttaaccatgccgttactggcaccgcttggcgatctggtcggtgttaaccgtcaggttaccgtgctggcattccagtttggtgatggcttcagtcacatcatttacccaacctcagcttcgttaatggcaactctcggtgtgtgcagggtggacttccgtaactggctgaaggtgggcgcgaccctacttggactgctgtttattatgtccagcgtcgtagtgatcggcgctcagttgatgggctaccactaaaaatgttaagagccgcaattgcggctcttttttcattctgccgtttcagtctctacggcttcatttttggcattgcgcttcatccacaacgccagcgctttcagcgagtctggagtgaactcatcgcagcgtgcggtgatttcttccggcgtcagccagcaaacttcactgacttcatcttcctgtagggcgaagggaccgtgagagacgcagctgaacaacgcgccccagacacggcaatttttatcttcgaaatagaactgcccgtgctcggcaaaggggacaccggcaatgcccaactcttcttccgcttcgcgacgcgcggattccagcagttgctcatcggcctgaaccacaccgcctgcggtcgcatctaacatgccgggtaaaaagtcttttgtctcggtacgacgctggaccagaattttgcccatgccatcatgcacgacgatgtaagttgcacgatgacgcagacactgtgcccgcatttgttcccggctggcttgtgcaatgacttcgttctcttcattgacaatatccacccattcagtacttgccaaacgacgctgttccattatcaggaaaccttctttttctggcgctcttacggcgcattttgagttgtgggtaaattacggattaatcgcgacctgcgcaatgatactttgatcattgagtgcgattacactaagtacgtcattatccagcatgccataactcgccggattaccgcctttcggaatactcaccgagccggggttgaagtggaaaatctccccccgctgttctgccactggcagatgggtatgaccgtacaccagcacatcgttctggtttaaagcaggtagattttccgggccaaaaagatgaccatgcgtcaaaaacagacgttgtttttccagtaatacctgttgccacggcgcggttatcgggaaatgcagcagcatttgatccacttcgctgtcgcagttgccgcgcacagcgataaccttatgtgccacttcattaagccgttcagcgactttggctggcgcgtaaccctccggtaaagcattacgcgggccgtgattcaacacgtcgccaaggatcaccagccactgggcaccactttgggcaaacaactccagaacacgttccgtcgccggtaacgacccatgaatgtccgatgcaaacatcagtttcatcactcactcctcgtcgaaaaaacgtaagctatgatactggattctgtcgttgctatcagccagattgcttcgccgaaagtgcaataaaacgctggacagacgctcgctgccactggaatgtcgcataatccaccaggcgttctggcacctcatcgccatgtagtaccaggcggttaatcattagcgccagatcagtatcagcaatgcaccattcaccaaataaattcggctgacccagtgctaacaaatgttctgccatcgcgaacagtttctctgcactggcttttccctcggccgttagtggcgcttttttcgcccccgcaaagacaacatccgtcggacgctcttcgcggatgggcatcagatcgctgcgcagccaggcctgaatccgtcgtgcacgcgcacgattttctaaatcaagcggataaatacgttcccaggtcggtggcgcaaatcgatcttccagatactccgcaatggcagaagattcactcaactcaaaatcatcgatttgtaataacggcacacggcgtgtctgaccgtaaccttgccacgtcggcttcaaatgttcaccgctgtcgaggtcgatggtcttgatatgaaacgacaggcctttttcctgcaacgccacccaggcggataacacataaggggagaaaaagtgggcatctgaccaaagcgtgatagcgggtttactcattatgtcctcggcaataaagggggctggctatcaaactatagagcctttttgtcactgtcacgtgacgaatactcacgtaagtcgccgcgctttctatacttgtggtgttcagatgattaaacaaccggagctgcaatgatcgatctctatttcgccccgacacccaatggtcacaaaattacgctgtttctcgaagaagcagagcttgattatcgcttgattaaggtagacctggggaaaggcggtcagtttcgtccggaatttttgcgcatttcgcccaacaacaaaattccggcaattgttgatcattctcctgccgatggcggcgaaccgctaagcctctttgagtctggtgccattttgttgtatctggctgagaaaacaggactctttttgagtcatgaaacgcgtgagcgcgccgccacattacagtggttattctggcaggtaggcggactggggccgatgcttgggcaaaatcatcattttaatcacgcagccccccaaaccattccttacgctattgaacgttatcaggttgaaactcagcgtctttaccatgtactaaacaagcggctggaaaactcgccctggctgggaggcgagaactacagcattgcggatattgcctgctggccgtgggttaatgcctggactcgccagcgaattgacctcgcaatgtatccggcagtcaagaactggcatgagcggatccgttcgcgccctgccaccgggcaggcactgctaaaagcacaactcggtgatgagcgttcggatagttaacagaaacaggttctcgtgtattatttcatcctaagtaaaacaacggagaacctgcaatggcacaacctgccgctattattcgtataaagaaccttcgtttacgtacgtttatcggaattaaggaagaagaaattaacaaccgtcaggatattgttatcaatgtgacgatccactaccccgccgataaagcgcgcactagcgaagatatcaacgatgcgctgaattatcgcaccgtaacgaaaaacattattcagcatgtagagaataaccgtttctctttgttggaaaaattaactcaggatgtgctcgatatcgcacgtgaacatcactgggtgacgtatgctgaagtggagatcgataaactgcacgcgctgcgctacgccgattcggtatccatgaccttaagctggcagcgttaaccgccatatcgggaggctgcatgaacatagtgatcaccggagggacgggattaattggtcgccatttgattccgcgtttgctggagctgggccatcaaatcacggtagtgacgcgtaacccacagaaagccagttccgttctcggccctcgggtgacgctatggcaagggctagccgatcaaagcaacctcaacggcgttgatgcggtaatcaacctggccggagaaccgattgctgataaacgctggactcacgagcaaaaagagcgtctctgccaaagccgctggaatatcacgcaaaaactggtcgatttgattaatgccagcgacacgccgccgtcggtactcatttccggctcggcaacgggctattatggcgacttaggtgaagtggtggttaccgaagaggaaccgccgcataacgaatttactcataaactctgcgcccgctgggaagagattgcctgccgggcgcaaagtgacaaaacgcgagtgtgcctgctgcgaaccggcgtggtactggcaccggacggcggtattctcggtaaaatgctgccaccgtttcgtcttggcctgggcgggccgattggttccggtcggcagtatctggcctggattcatattgatgatatggtcaacggcattctctggctgctggataacgacctgcgcgggccatttaatatggtttcgccctacccggtacgcaatgaacaatttgcccatgcgctcggtcaagcgctgcatcgcccggccattttgcgcgtccccgcaaccgccattcggctgttaatgggcgaatcttcaatactggtattaggtggacaacgcgcgctgcctaaacggctggaagaagcgggttttgcgtttcgctggtacgatttagaagaggcgctggcggatgtcgttcgctgatgtggtttacagcaaacatccgccagttaactcccggtgttacaggattagtggctttgcgcgataagatcgtctggtgaaagtcgggtcaccatcataactaactctctgtctaaacctctatccagcatctcctgagcaatacgcagggcttcttcgtgtttgccctgcattgcgccttcttcacgtaatctgtcagcaatggtcatcagtttctccttttcttgtggtgcgcgttctgttatctcaccaataaatgcacggaaacgctgggcatcccctgtttgtaatacgtaattaaacagggcttttagctgtctgtcattagtgttccctgtaactagcagcgaaacaatttggtcgactaatcccaacagatcgcgctgacgaatatgtttctgaattaactccaacagcgccattttgcggtgttgcataatctcgtcatccggcaccacggtaatatccaccaacggaaacgctgatgaatatattttgcgggctatagcaggctcggcaaattcatcaagccagcagagtgaataaggataaggacttctgcaaccatgataaaacagcatcgggatcaccaatggaagctctttatagcccgcatcaagatggttttgcattgccgcaatggaataacgcatcatgcgaaaagccattaattcttccagcttactttggtgctctatcactacataaatataacccactccctcctgcgttttcacagaccacaagaggtcggaataatattgccgcaggtcttcatcaataaaactgtttgattctagtttaagcgtcgttaaatcacacagtttgcgcagcggcgcgggaagatgaatatcaataaaatcccgcgcggtgtctggatggcgtaaaaaagatttaaataccgcatcatgcggcgtggaagttgtcgatattgtcatggcgttccgtcacccctcaaatttaagatgacgcgacaataaccacgattaacacccaatgcagcaggcagtttttatctttggacagcgaattcagaagtatttttagcggactgcaacttttacatttcagcggaagctgactcgcaaattccccatgaaaatactccggcagcgttagccaccggagaggaaattatttcagcgatcccttaaggaactgttgcagacgagggctttgcgggttgccaaataactgctccggcgcgccctcttcttctattttcccctgatggaggaaaatgacgtgagtagaaacatggcgagcaaagcccatttcgtgagtcactaccaccatggttttcccctcttctgccagttgctgcataatacgtaacacttcgcctaccagttcaggatcgagcgccgaggtaggttcatcaaacagtaaaacttccggttccatcgccagcgcccgcgcgatagaaacacgctgttgctgaccgccggaaagatgcaccggatatttcccctgcgcacgttcgtctatcccgactttcgccagatacttcaccgcccgctcgcgcgcttcctgcttgctcaggcccaacacctgaatcggcgcttccatgacgttttccagcaccgtcatatggctccagagattgaagtgctggaataccatcgtcaggcgtgtgcgcagtaagcgcagttgatttttatcggcgactttgagttgaccgtctttgtcgcgcaccagattgatcgtctggccattgaccacgatcgacccttcactcggtttttcgaggaagttaatgcagcgcagaaaggtacttttccccgatcccgacgatccgatgatgcttattacatctccggcattcgcttgcagtgagacccctttcagcacttcatgttcgccgtagcgtttgtgcaaatcgataacgtttaatttattctcggacatcgtattctcagtgcgttgaagaaggtttcacatgctgcaaccagcgtttttccgctctgcgaaagaggctgatcaggacataagagatgattaaatagagcaccgcggcaatgccgaaggcggtaaaaggttgatacgtggcggcgttaatatcgcgggctattttcagcagatccggcacagtggccgtaaacgccagcgcagtagagtgcagcatcaggatcacttcgttgctgtatgccggtaacgcaatacgcagcgcagaaggcaaaataatgcaacgatacattttaaaagtcgagaagccataggctctggcggcttcaatttccccatgcggaaccgaacggattgccccagcaaaaatctcggtagtgtaagcgcaggtgttaagcgtcagcgccagcacggtacagttcaggccactgcggaagaaagcgttaaggaattcggttcccttaacaatctcaagcgtgtacatgccggaatagaacaccagcaactgaacatacagcggcgtaccgcgaaaaatataggtaaataaccagattggaaactggatgtatttattactggagacacgaccaatcgccagaaacagcgccaggactccgcctatcactaccgacaaaataagcagccacagagtgatcgccacaccagtaaagcgataaccgtcggtccacagcagcggtttccagtattcatgtaagatttcgatcacaggtcagccctcttcacacccacggagtagcggcgctcaaggaacagcagcacaccattggaaacagtggtgaaaaccaggtaaatcacgccacagacgatggcgaaatagaacggttcccaggtacttttgcctgccagttgggtggctttgaccacatcttccaggccgagtaacgaaaccagtgcggtagatttgaggatcacctgccagttgttgccaatgcctggcagggcgtaacgcatcatcgccggaaacatgatccgccgaaacacttgcccacgagtaaaaccgaacgccgtcgccgcctctatatgtcctttcggcactgccataaaagcaccacggaacgtttcggtaaaataagcaccgtagataaaaccgagagtgataataccagcgaccatcggatcgatatcaatctgcccgacgcccatcgcctccgtcaccgtgtttagcgcaatctgcaaaccgtagaaaatcagcagcatcaacactaagtccggcacgccacgaatcagcgtggtgtacccttcgaaaatcagccccgaaagccgattttgcgagagcttaccgccagcgccaattaaaccgatgattacagcgagcactacagagctgatagccagctccagcgtgacgagcgcaccctgtaaaataacacctgaaaacccatacaacatgctgcctgtcctgtcgtgtgtggtgaattaccgcctcttgtctccctccggttacccgaagggagcgggctttctttcaccgatggcgattagccaccataaacatcaaaatcgaagtactttttcgctaatttctcgtaagtaccgtcagcgcgcatttcggcaaaggctttgttcagtgcttcgcgcagttcgttatcttctttacgcaggcccatgccggtccctacgccaaacagtttttcatctttaacagacgggccaccgaatttgtaatctttaccgacaggttgtttgaggaaaccttcgctggcagcgacctcatcctggaacgcggcatcaatacgtccggcagtcaggtcagaataaatgttgtcctgcccctgatacgagacgatttcaatgccttttggtgcccaatgttcattaccgaacgtctcctgggtggtgccctgcaatacgcctacccgtttgcctttcagcgactcgactgtcggctgaatgtcagaatttttcgccaccaccaaacgagaatcggcagcgtacagtttgtcggtgaaggctatttcttgctgacgtttttccgtaatggaaagcgatgacatgatggcgtcaatcttcttcgcttttaaggacgggattaacgcatccagcggattttcgacaaacgtacattgcgtattgatgcgtttgcataattcctttgccagatcgatatcgaagccaaccagttcgccttgtgaattttttgattcaaatggcgcataggtcgggtcggtaccgatgcggatgttttgcggaatcgcagcaaatgccgcagttgcgctggagaaggccagaaccagagagagcgatagcaccagttttttcataatgtcctcaactgacagtctttttatagggaatatttacaggtttgttacacttatcgtgccataaaattgaccatcaaggcaaaatattccgccccgttagacgtattatttttcattaaaaatgcttaagtatgcatttcaatgcaccacgatagtgcaacaaacctggcgtgcaccatgatgatcattccatcaggtacagcttcccagcgacgtatcagtcaccgtagacattaaagtcgaaatactttttcgccatcttgtcgtaggtgccgtcctgacgcagctcgccaagcgccttattgaaggcagccgtcagttcagcatcatctttacgtagccctacaccggtgccatcaccgaagtattttttgtcttttactgatgagccagcaaaggcgaaagctttaccagcaggttgcttgaggaatccttcgctggcagcaacttcatcttgtaacgcagcatccagacgtcctgcagccagatcggaatagaccaaatcctggttggcataggccaccacatccacgcctttgctacgccaggtctcgttagcgtaagcttcctgggttgatccctgcagcacaccaacatgtttacctttcagtgaatccagcgttggctgaatcggtgaacctttggcagcaatcaaacgagaatctgcggcgtacagcttgtcggagaaggcaatctcctgctgacgtttatcggtaatggaaagcgacgaaataatggcgtcgatttttttcgctttcagtgaggggatcagcgcgtcaaagtcactggcaacccaggtacatttcacctgcatccgtttgcacatctcgttaccgagatcgatatcaaagccaacaaaatcacctttagcatctttcgacgagaacggcgcataggtggtatcggttccgatacgtaccgtctccggtagcgccgcatagctggaagccgctgcggagagaccgactaacaaagacagagcgagaatcgacttcttcatacataaccctcaagtgaaaatggcttttttatgttgtgtattgtgttgtgtgtttgcaggctctttcatgcaggtcttatgccatcttgacgacaacagtaacattcaacgttaaatatgttaataagacgttgcattattgtcctgaagttgaagatagcaggtatagcggttgaatcgcagcgtttcgattgaatggcagaaacaaaatgtcgaggatttgatcgcggttgcaaaattgccctgaaacagggcaacagcggagttatgcgccctgccagcgggcaaagagatcttcaggaagggttattgcaaactggtcaagaacacgattaaccgtctgatttatcacatcatcaagggattgcgggcgatgataaaacgccggaacgggaggcataatcaccgcaccgatttctgccgcctgagtcattaaacgcagatggcctaagtgcaatggtgtttcacgcacgcagagcaccaacgggcgacgctctttcagcaccacatctgccgcacgggtcagtaagccatcagtatagctatggacaatgccggaaagggttttgattgaacagggtaaaatcaccatccccagcgtctggaaagaaccggaagagatgctggcggaaatatcgcgcgcatcgtgcgtgacatcagctaatgcctgcacttcgcgcagggaaaaatccgtttcgagggataaggtctggcgcgccgcctggctcatcaccagatgcgtttcgatatctgtgacatcgcgcagaacctgtaataagcgcacgccataaatcgcgccgctggcaccgctgatgcctacaatgagtcgtttcataaatagttgccctgtcagacttgcaggcagactttgcagtatttcggcgggagttgcaagtcagggtgccagaccggcaccctcagcgaaggcatcatccttcgttatgcatttcgagattttccacttcgttctgacgttgcactgctttggcgtcatcattacgtaacgtatcgaggaaatcgaggtagccctgatcaacatctttggtgacgtagacgccgttgaacaccgagcattcaaactgctggatatccggattttcagcgcgaacggcgtcgatcagatcgttcagatcctggaaaatcaacccgtcagcaccgatgatctggcgaatttcatcaacttcgcgaccgtgagcgatcagttccgtggcgctcggcatatcaataccataaacgttcgggaagcgaatttccggtgccgcagaagcgaggtacactttcttcgctccggcttcgcgtgccatctcgataatctgctcagaagtggtgccacggacgatggagtcgtcgaccagcaggacgtttttatcgcggaactcggcgcggttggcattcagtttacggcgcacggacttacgacgcagctgctggcccggcatgataaaggtgcggccaacatagcggtttttaacgaagccctggcggtacggtttgcccagaatacgagcaatttccagcgcgatatcacacgaggtttctgggatcgggatcaccacgtcgatatccagatcttcccattcgcgggcaattttctcgcccagtttcgtgcccatattcacacgcgcgctgtaaacggaaattttgtcgatgaacgagtccgggcgagcaaagtatacatactcaaacaggcacggattgctgaccggattgtcagcacattgacgggtaaacaactgcccttcttcagtgatgtaaatcgcttcgcccggcgcgacgtcacgcaggaaatcaaagcccagcgtatcgagcgctacgctttcggaagcgaccatatattctgtacggttctcgtcaatatcacgttttcccagtaccagcggacgaatcccgtttggatcgcggaaagcaaccataccgtggccgataatcatcgccacacaggcatatgcgccgcggattaagcggtttgtggcagcaatggcagcgaaaatattgtcggcttccagcgggtagtggcggaagttgtccagctcgctagcgaagatattaagcagaatttccgagtcggaagtggtgttgatgtggcggcgtttttcttcaaacagttttttacgcaactcgtgagcgttggtcagattgccgttgtgggcaagcgtaatgccatacggggagttaacgtaaaacggctgcgcttcagaggcgctggagctgccagccgtagggtaacgcacatgaccaatgcccatattgccctgcaaacgctgcatatggcgagcttcaaatacatcgctcaccagcccgttcgctttacgcaaacggaagcagttattggcatctatggtgatgatgccggcggcatcctgaccgcgatgctgaagcaccgttaaggcatcataaatcgactggttaaccggcataacaccggcgataccgacaataccgcacatacgtctttttcctcgttaagccacatctcagagcacttacgctctgggcaagaaacttgacgagctttgcagataatcaaaaaaccatctgatgataaaactgaactgcgggatcagctgtgatttgctccagtcttcgcttttcgacaccccggtaaaggagtcgagaaagaagagaatggcggcaacaatcaacacaccgcgcaacgcaccgaaacagacgcccagcacccgatcggtgcctgacaaccccgttttctccaccaactggcctatcacgaagttcacgatagcaccaacaatcagggtagcgataaacagtaccgcgatggcaattccatttcgaaccagttcgtcttcaaagcccgtaaaccagactgacaggtaagtgtagtaatgactggcaacaaagaaagcacaaccccatgtcaccagcgataacgcttcacgaacaaagccgcggatcaggctaaccagagaggaaaaagcaatcaccgcgattatggcgtaatcaatccagaccatatgtgtcccacgattttacgccctgtcatcctgttcggggcgcattctaacagaaaaagaaaacgtttgcgtagggatttccttcccacgcatcaataaaaatggcgctgaaaaaatattcaacgccatcgactttttatgcctttgcggcatcgtgcaatgcgtgtcggatgcggcgtaaacgccttatccgacctacggttctaacactgcccaggcctgataagacgcgccagcgtcgcatcaggcaagactgtattaattcggcgtatagcccattaccacgccacttaagccagaaagttgcttcaactcacccagcgaacctttcagcttatctttcgaggcatccggcccaaccagaatacgggtaattttaccctgcactggcgtggatggcgacgtataaacccgataaccggcaccgcgcagcttaccgacaatctcattcactttatcggcatttttcagcgcacccagttgcacaacataggctttacccgttggcgctgctttttcttccacgaccggcttcggttctggcttcggcgcaggtggtgcttcaaccttcggtttaggcggctccaccggtttcggcttcggtggggcgaccggtgcaggttccggttcaaactcggtgttattggctgcaatagtggccggatcgagcgacggtgctgcggcatcacctgcccgcacctcttccgctgcgccttccggcggctgcgtcggcaacgcctgggtggcggctggcatcatatcaggctcatcgcgatcgcccgcttttggaaccagcgggatagccgcaaactcatcctgataatgttttttctgcccgtccagcagccctggaagtacaatcacccccagcgccaccagcacgatcgtgcccactaaccgattctgaaacttacttgccaccgcttctcctcgcgtcaatcacttccatgacatgtgcgaccgtgtggaaagaaccacacaccagcacggtgtcttccgctttagcgtccgccattgcggcatcccatgcctgcgcaacgctatcaaatgatttgccgttacccaaatgctcaagcagttgttctgccgtggcaccgcgcggcccttccagtggcgcacaataccagtcatcaaccacgcttttcaaccaggccagagttccggcaatatctttatcatgtagcataccgataaccgccagcacgcgcccgtttttcggtagcgctttcatacgcccggtgagatattccgccgcatgtggattatgcgcgacatcaaaaataacgcgtggcgactcgctcacaatctggaaacgtcccggcaaaattgcgctggcaatcccgtcgcgaatggcattttcactgacttccagcccgctggcacgcagtgccgccagcgctgttgcggcattcggttgcgggacaagcggcaacggcagattttccagcgtgccgtgagcatcgctaaacgcccagtcatgatcggtgacggaatagttccactcaacgccccgacgttgtaacagtgcacctttttcctgcgccacatcagcaatggtagaaggcatttccggctcaccgacaattgccggttttgcgctgcgaaagatgcctgctttctcgcgaccaatactttcgcgatctggtcccagccagtcggtatgatccagcgcaatgctggttactacagccacatcggcatcgacaatattggttgcgtccagacgaccgcccagccctacttccagaatcactacgtcaagttgtgcctgtttgaacagccacaacgccgacagcgtaccgtactcgaaataggtcagggaaatatcaccgcgtgccgattcaatctccgcaaaagaggcggtgtgggccgattccggcaattcctgcccctgcacacgtacgcgctcggtataacgcaccagatgcggtgaactgtagacgcccactttgtaccctgccgccatcagaatcgactccagcgtacggcaggtggtgcctttgccattcgtacccgcaacggtaaacacaaatggcgctggtttcaggacgccaagacgcgccgcgacctggctcacgcgctcaaggccgagatcgatagttttactgtgcaggttttccagataagaaagccacgaagccagaggcgacgcggcttgaggagtgcgtttgataatcatggtatccgctgattcgttacggtgagaatagcaaaagggcagagccagtggccctgcccttatcagttatcaggcctcaggttcctgatccggtaccgggggtaccactacgccttcacgcggcgcttcaggattcggcgctggcagattcatcaacttcgccagaatgctcgccagtttcaggcgcatttccggacgatggacgatcatgtcgatggcgcctttctcgatcaggaattcactgcgctggaatcctggcggcagtttttcgcgaacggtctgttcgataacacgcggaccggcaaagccaattaacgctttcggttcagcgatgttgagatcgcccagcatggcgaaacttgcagaaacaccgcccatcgtcgggtcggtcagcacggagatgtacggcaagccgcgctcctgcatttttgccagtgccgcagaggttttcgccatctgcatcagcgacatcagtgcttcctgcatacgtgcgccaccagaggcggagaagcagatcagcgggcagttatcttccagcgcctgctcaacggcacgcacgaaacgtgcacccacaacagaccccattgaaccgcccataaaggcgaactcgaatgccgcagcgacaaccggcattccatacagagtgcctttcatcaccaccagcgcatctttttcgccggtttctttctgcgcagaagccagacggtctttatacttcttggagtcacgaaacttcagcacatctttcggctcaagctcgctacccagctccacaaggcttccttcatctaacaggctatgcaggcgattacgcgctgtcatacgcatgtgatggtcacacttcggacagacctcaagattacgttccagctcagcgcggtataaaacctgaccgcagctatcacacttagtccacaccccttcaggaatgctcgccttgcgggtgggagtaatgttgcttttaattcgttcaatccagctcattagggacctttctgtctgaacctggttcgatgccagttttatctttggggacgcataatgccatttttgcccccaacagaccatgaatgttgcacattaaaacataacagcccgaaactttggataaaaaagtggtcgaaccgcggagttactttttattttgcggcgcgtgccgcagcgcgtttgtgacgaataaattcgaaaaccccaggcaatattgaaacaaaaataatgccaacaatcatcagcttaaggttgctctgaatgaaggggagcgtgccgaagaaataacccgcgtaggtaaaaatcagtacccacaacagtgcgccgatcacgttataagcggcgaaatgacggtacgacatgtggcccattcccgcaacaaacggcgcgaacgttctgacgatcggtacaaaacgggcgagaataatcgttttgccgccatgtctctcgtaaaactgatgagtcttatcaagataactgcgacgaaagattttcgaatccgggttactgaacagtttgtcaccaaataaccgtccaatggtatagtttactgcatcaccgacaatagcggcaatcaacataagcaccaccatcatatggacattgagatcgttagtttccagcgacgccaatgcaccagcaacaaacagcagcgaatcaccaggcaggaatggcgttaccaccagccccgtttcgcagaacagaatcaaaaacagaatggcataaacccagacgccgtactccgcgaccagctctgccagatgcacgtcaatgtgcaggataaaatcgatgaggaaataaatcaggtccatatttgcctatgccttgtactcgtcatctttcaggctgtaactacgttggctacagcctgaaatgttccgagcattattctcgttagtccgccagaaatagcgggcccattggcggttttggaagatcataccggtcagggtaatccaccgcgaccagatacagcccttccgcttttgccgttgctgccgccagcgttctgtcctttgccgccagcaactctgctatccatctctccggctggttgtgggcaccgacttccatcaggctgccgacaatattcctgaccatatgatgtacaaaggcattcgctttgatatctaccaccacataaggaccgtgacgcgtgacattaatatgcataacgttgcgccacggggttcgggactggcactgcaccgcacggaacgaggtgaaatcattctcgcccagcaagcattgcgcagcccgatgcatccgttcagcgtccagcggttcgtaaaaatgggttacccctttactcaataccgccgggcgcagccgatgattgtagatgatgtagcgataacggcgagccgtggcgctaaatcgggcatgaaaatcatcaggtacagctttaacccaacgcacggcgatgtcaccaggtaaattcgcatttacgcccaaggtccacgccgcgtctttgcgctgcgcggttgtttcgaaatgcaccacctgcccggtaccgtgtacccctgcgtcagtacgcccggcgcagaagacggtgatgggttcgttcgccacctgggagagcgccttttccagcttctcctgcacactgcggacttcattctgccgttgccagccgtaatacttactgccgtcgtactcaatgcccagcgcaattttataaactggcagttgttgctggtcggacattagtacagatactcctgcaccagtttctcggcgatttttactgccatcagcgcgccgccaaagcgaacgttatcggccaccgaccagaactggacttgctccggcataccgtagtcattacgcacgcagccaacagaaagatgcggcgtacccgaagcatcccctacctgagtcgggaattcgttctcttcagagagcacaatatcttcgccctgagcaaacgcatcacgcgcttcttctgccgccagcggacgcagtgcttcaaagttgaccatctgggcatgaccgtagaataccggtgcctggacgacgcttgccgaaatcatcagcccttcgtcctgcaggattttgcgtacttcgtcaacgatacgacgttcttcacgcacgctaccttcgctatccggcaacaacggcagcatattgaacgccagttgacgaccgaagaaatcttcttcgtcaatcggaatgccgttgagcaatttcgcactctgccccgctaacgcatcgaccgcttttttgccctgggcggaggctgaaatcaggctggtaacactgatacgcgacaaaccgccctgatcgattaacggtttcagtgccgccagcagctggctggtcagactgtctggtacggcgatgacattccggttgcggtaatcggtcagtacaaacgggtttacttccggcaccaccagcggtacgtcgggttcgagagcaaacagtccgctgctgtcgatcaccaggcaacctgagttggtcgcttcttcaacccaggcagcggtagcttctttgcctgcgacaaaaaatgccagctgcgcctgcgtccagtcgaattcagcggcatcctgcacagtgattgttttaccaccaaagcgcagttgttcgcctgcgctttcgttacgtgccagtgcataaatttccccaaccgggaactgacgttcagccagcgtttcaagcagggcttcgcccacagcgccagttgcgcccaggacggcaatgttccagccttcagacatggtggtttactccagaaatagcaaagctccctgccaatgttacagcagagagcatgaagaagagattaacgtgccggatgatgaacggcgttaaaacccagtttacacagcaatgatgccgcactggcgtcatcacaaattacatacagagatgaccattcacggcgctcaagatagtttttgcgcagtttatcgaactcacccggtatcccggcgactttacgcagcggtgcgtcatcgcggcgcacatcatacaccaaatgcaccagccttttcagcgtcggttgatcgagcgggccatgcagcgtaatgcgaccaaactctggcgcgggcagtaatgtatccagcgcaacgtgctgttcatgcccaataaacttgctataggcttcaaacacttgcgtagtaccgcgtgctttaccttccagggtataacctgcgatatgcggcgtgccgatatccacttttgtcagcaactccacgttaagttccggttcgccttcccagacatccagcactacgcttaacttctggccttcattcaggcaggtcagcaacgcagtattatcgacgactgcgccacggcaggcgttaatcagaatcgctcccggcttcaggctacggatcagtttttcatccgccagatgcagcgttttgtacggcccatctttgaagagtggcgtatggaaagtcagaatatccgcatgctgaactaattcatccagcgagcggaaatcaccctcatccccacggtcagcgcgaggcggatcgcaaagcaatgttttaatccctaacgcttccagtcgcgcctgcaatcgacgtccaacgttaccaacgcccacgatccccaccgtacggtcgtgcagtgaaaatccatcgcgttcggcaagcatcagtagtgaggagaaaacatattccaccaccgcaatcgcattacagccaggtgcagcggaaaaaccaattcccgcctgcttcaaccatgcttcatcgacatggtcggtccccgcagtggcagtgccaacaaatttaatgggttttcctgccagcaaagattcattcactttcgtgaccgaacgcaccatcagcgcatccgcgtctgccagttgagcgacggggattggacgcccgggaaccgcggtcacctcacccaaacggctaaataagtcgcgggcataaggcatattttcatcaacaaggattttcacgtttgtgttacctgtatgagacgagagttaaccggacaagtgtgccataatctcgcggccaggcatacttgcgaagatttcaggtataaggatacgtaatgatacaacctatttccggccctcctcctgggcaaccaccaggtcagggagataacctgccgtctggcgcgggcaatcagcctttatccagtcagcaacgtacttcgctggaaagcttaatgacgaaagtgacctcactgacgcaacaacaaagagcagaactgtgggcgggtatcaggcacgatattggtctgtcgggagattcaccgctgctttcgcgtcacttccctgccgctgagcataatctggcgcaacgtctgctggccgcgcaaaaaagccattctgcccgccagcttttagcgcaattaggggagtatttacgtctggggaataatcgtcaggcggtcacggattatatccgtcataactttggtcagacgccgctgaatcagctctcaccggagcaattaaaaaccattctcaccctgttgcaggaagggaagatggttattccgcaaccacagcagcgcgaggcgaccgaccgtcctttattaccggcggagcacaatgcgctaaaacagctggtgaccaaacttgcggcggcaacgggggaacccagcaaacagatctggcaatcgatgctggaactttccggggtgaacgatggcgagttaattccagcgaaactgtttaaccatctggtgacctggttgcaggcgcgccagacgttaagccagcaaaatacgccgacgctggaatcactacagatggcgctaaaacaacctttagatgccagtgaactggcagcgttatcggcgtatatccagcaaaaatatggtctttctgcgcaatcatcgctttcttctgcccaggccgaggatattcttaatcagctttatcaacggcgggttaaagggattgatccgcgtgatatgcaaccgctgcttaatccttttccaccgatgatggacacgttgcaaaatatggcaacgcgtcccgcgctgtggatactgttagtcgcgattatcctgatgctggtctggctggttcgttagccccgacgaaatgacagtatcgtgacaataattcccagcaccgcagagatcgccccggcaagaaataccgaagagtaaccaaacgtggtcgccagcattcccgccagcggcccggagacgccgagggcgatatcctgaaacgcggcgtaaccgcccagtgcggtgccgcgaacttgtgaggggacgcgtttaaccacctccacgcccagcgcaggaaagataagcgaacatccggctccggttaacgccgcgcccgctaatgcgacccacgcacctggggcttgccagagcagcaacaagcccaccgtttctacaagcagagagacaatcgccactttcacgccgccaaaacggtccggcatccagccaaacatgacgcgcatcacgacaaatgcgccgccaaactcggtaagagtaaagcccgccatcgcccatcctttgctggcaaagtagagcgaaacgaaagtcccgataaccgcaaaaccaacgccttgtagtgccagccctaaccctggtttccagataaacccgacaacgctccacagcgatggacgttctcccgccagggccggtactttgcgcactgtgccgttacaggcccacgccagtaagggtaataccattgtggtgatcgccagtgcggcaaaaccgtaatggctatgaatcaacaggccaagcggagcaccaacagcgagggcaccgtaaatcgccattccattccatgacatcactttgccagagtgttttggccctacgatgcctaacccccaggtcagagcgcctgtcagtaactggctttcaccaaacccaagaatcaaacgcccgatgaccaacagggcaaatttgaacggtgcggagacaggcaaaatcgccgccagcagcaacgcgccgccagccagaccacaagctaacatcccctgaagcgccgaacgttttgcgccatattgatcggccagtcgcccggcatagccacgcgtcagcaccgtagccagaaactgaatcccgacggcaatgccgaccatggtattgccatagcccagttcatgatgaacaaacagcgggataaccggcaacggcagccctacggtcatgtaggtgagaaaaaccgcaaaagcgatgcggaagagcgaaaaattggcagaagatcgtgtttcggtttggcttacagcagtcatgcattactccagaatgcagcgcaaggcgaggagtatccccgtctcatctctctggtttcagggttacggtgcgttggcaggatttaacgcgtacgtcttttcagaaggaaatcgacaaagcgggaagtttgcctggaactggtggcgattgtcaatgatgtgaaaaagggaaccatcaggttcccttttgcgttagtgccggaggccgcattggcgcgtaacgtcggatgcgacgctggcgcgtcttatccgacctactccggcctactgcgaattaatctttcagcttgcgcattaccagcgtggcgttggtgccgccgaagccgaagctgttagacataacagtggtcagttcgcgatcggtcgtttcggtcacgatgttcagacccgcagcctgctcgtccagctcttcaatgttgatgctcggggcgataaagccgtgttccagcatcagcagagagtagatagcttcctgcacacccgcagcgcccagtgagtgaccggtcatggctttggttgcagaaatcgccgggctcttatcgccgaacacttcacggatagctgccagctctttcacgtcgccaaccggagtcgaagtaccgtgagagttcaggtaatcgattggggtatcaacgccatgcatcgccatctgcatacaacgtactgcgccttcgccagacggagcaaccatgtctgcaccatcagaggttgcgccgtagccaacgatttcagcatagatgtgagcaccacgcgccagcgcgtgttccagctcttcaaccactaccataccgccgccgccagcgataacgaaaccgtcacggtgagcgtcgtaagtacgggaggctttttccggggtgtcgttgtatttagtagacagcgcacccatcgcgtcgaattcgcaggccatttcccagcacagctcttcgccgccgccagcaaacacgatgtcctgtttgcccagttggatctgctctactgcgttaccgatacagtgtgcggaagtcgcacacgcggagctgatggagtagttaacgccatgaattttaaacggcgtggcgaggcaggcagaaacgccggatgccatcgctttggtgaccacatacgggccaaccgctttcaggccgcgcgggccgcgcattgcgtcagcgccgaatacctggaaacgcggggaaccgccgccagaacctgcaatcaggccaacgcgcgggttattctggtaagcttccggagaaaggcccgcatctgcgattgcctgctccatagaaaggaatgcataaatggatgcgtcgctcataaagcgcacaactttgcggtcaatgaggccagtggtatccagttttacgttgccccagacgtggctacgcatgccggaatccttcagctcctgagagaaagtgatccctgaacgtccttcacgcagagatgccaggacttcctgctggttattaccgatgctggaaacaatgcccaggccagtaatcactgcacgtttcattcaatacctctgtaagtcgcacatagagtaagtttcgaatgcacaatagcgtacacttgtacgccgaacaagtccgatcagccatttaatagagaaatttgcgcagccttacacacatcgctaagatcgagccaccgcctgtaagacgagtaacttacgtgaaacactactccatacaacctgccaacctcgaatttaatgctgagggtacacctgtttcccgagattttgacgatgtctatttttccaacgataacgggctggaagagacgcgttatgtttttctgggaggcaaccaattagaggtacgctttcctgagcatccacatcctctgtttgtggtagcagagagcggcttcggcaccggattaaacttcctgacgctatggcaggcatttgatcagtttcgcgaagcgcatccgcaagcgcaattacaacgcttacatttcattagttttgagaaatttcccctcacccgtgcggatttagccttagcgcatcaacactggccggaactggctccgtgggcagaacaacttcaggcgcagtggccaatgcccttgcccggttgccatcgtttattgctcaatgaaggccgcgtgacgctggatttatggtttggcgatattaacgaactgaccagccaactggacgattcgctaaatcaaaaagtagatgcctggtttctggacggctttgcgccagctaaaaacccggatatgtggacgcaaaatctgtttaacgccatggcaaggttggcgcgtccaggcggcacgctggcgacatttacgtctgccggttttgtccgccgcggtttgcaggaagccggattcacgatgcaaaaacgtaagggctttgggcgcaaacgggaaatgctttgtggggtgatggaacagacattaccactcccctgctccacgccgtggtttaatcgtacgggcagcagcaaacgggaagtagcgattatcggcggtggtattgccagcgcgttgttgtcgctggcgttattacggcgcggctggcaggtagcgctttattgcgcggatgaagcccccgcgctgggtgcttccggcaatcgccagggggcgctgtatccgttattaagcaaacacgatgaggcgctaaaccgctttttctctaatgcgtttacttttgctcgtcggttttacgaccaattacccgttaaatttgatcatgactggtgcggcgtcacgcagttaggctgggatgagaaaagccagcataaaatcgcacagatgttgtcaatggatttacccgcagaactggctgtagccgttgaggcaaatgcggttgaacaaattacgggcgttgcgacaaattgcagcggcattacttatccgcaaggtggttggctgtgcccagcagaactgacccgtaatgtgctggaactggcgcaacagcagggtttgcagatttattatcaatatcagttacagaatttatcccgtaaggatgactgttggttgttgaattttgcaggagatcagcaagcaacacacagcgtagtggtactggcgaacgggcatcaaatcagccgtttcagccaaacgtcgactctcccggtgtattcggttgccgggcaggtcagccatattccgacaacgccggaactggcagagctgaagcaggtgctgtgctatgacggttatctcacgccacaaaatccggcgaatcaacatcattgtattggtgccagttatcatcgcggcagcgaagatacggcgtacagtgaggacgatcagcagcagaatcgccagcggttgattgattgtttcccgcaggcacagtgggcaaaagaggttgatgtcagtgataaagaggcgcgctgcggtgtgcgttgtgccacccgcgatcatctgccaatggtaggcaatgttcccgattatgaggcaacactcgtggaatatgcgtcgttggcggagcagaaagatgaggcggtaagcgcgccggtttttgacgatctctttatgtttgcggctttaggttctcgcggtttgtgttctgccccgctgtgtgccgagattctggcggcgcagatgagcgacgaaccgattccgatggatgccagtacgctgacggcgttaaacccgaatcggttatgggtgcggaaattgttgaagggtaaagcggttaaggcggggtaatctgctctcgcagtgtttgccggatgcggcgtgaacgccttatccgacctacgtgtgacgtgtaggcctgataagacgcgataagcgtcgcatcaggcatggtgctccagacgccgcaacttactgctgtgacgcctgctgaaacaggttttcccacatatcggtcaccagcgcctggtcacgcggcgacaattcaccggcaccaatggctttttccagactctggctaacggtcgtatgcaccgcctgagcggagtggtcatcaccactttccagttctgcgatggctaatgtcaggtggccacgcaaatacccactggcaaacaactcatcatcactggcatggtcaaccatgccgtcgattaatgccagaatgcgtgattcaaactccgcgatcatcttctttcctcattgtaaaacgtggcaccggcttcagttgagcgcttccggccacgggaactgttccgccgtaagttccggcgtgtgataataattttgtagtgctttaatgaagcgtgccggacgctcgggaatgccatttgtcagataatccatcacctgcgcatgtacccgccgttgaaacacaacacgatccggttcgaagtcgccttccagattgtcgcaactgacgttaaacggatatcccgccgccacacagaacaaccagtcgagtgcctgcggcttcacttcaacatcttcaaactggctttgcgtttgggcatcacgcccatccgggcaataccagtagccgaaatcaaccagctcacggcgcgcttttccggcaatacaccagtgcgaaatctcatgaattgcgctggcataaaagccgtgggcaaagacaattcggttatacggtacttccgcatcagcaggaagatagatcggttcgtcgtcgcctttaatcagacgggtattaaattcatcggcaaagcagctattaaaaatttcaatcaactgctcatagtggtgtgtactgttcattagttcatccccaaccagtggaggatctcctgtccgtggctatcgtaaagtaatttggcactcatcaccgccgagacgataacaatcatcgggcggatcagcttttgtcctttgctcaacaccagccgtgaacccatgcgcgcgccgaggaactgccccaccagcatgacaaagcccgtcgcccaaatcactttgccgccgagaataaacagcagcagaccgccaatgtttgacgttgcgttgagtaatttggcgtgagccgtggctttggcgaggttgaatccgcacagcgtaacgaaggccagcgcgtaaaacgatccggcagccgggccaaagaatccgtcataaaaaccgacgcagccaccggcaattaacgcgaagggtaaaccgtacatccggcgctggcgatcttcttcacccagctttggcatcagcaagaaatagaggccgatacaaatcaccagaatgggcaaaatctgccgtaagacatcagcctgaacgtactgtaccaacagtgcgccgctcattgagccgacaaaggtcatggcaatattgagtttctgatcgcttaaactaaccactttgcggcgaataaagtagatagtggcggaaatagagccgccgcaggcttgcagtttattggttgccagcgcgttagcgggagacattcccgcagccatcaatgccggaatggtgagtaacccaccgccaccggcaatcgagtcgataaatcccgccagcatggcgacaaaaaagagaactcccagcaacagcggggaaaccataaacaggctattaaacgtttccattagatcacgtgctcatccagtagcgcctggcaggaaggcggcaacggaggcggtgtcttcttctcaggctttgttgttcccggttttagaggtgcaaaccagctttgcagttctgccccgcaaccatcgcctgatggcggtaaaggttgatcttcacactccagactatcggcagggcaacgtaatcgtacatgcatatgcgcgcgatgctggaaccagggtcgcactttgcgcaaccagtcgcgatcggtgcccgcatcaaggcaaagttgttgtttaatcgccggattaacaaaaatgcgcgtgacgtctttgtcctgggcagcgagtttgatcaagctgaaaatttctggcttccacagcgtggagacaacgtgtttaccgtcgcgggaaactaagtccagtgcttgcgggcgcaagagctgcgcggaggtccagcgagttttcggcagttgcagaaagatatcgacatccagtccggtctggtggctggcatgaccgccgttgaaacgcccaccagcgggcatccccatatcgccaatcagcaccgtacccatgcccagattgctcacctggctactcagacgctggataaacatcaccagatccgggtgaccgaaatagcgacgctgatcggtacgcatgacctgataatgttcggactgtatcggcaacgtgtcagcgccgacaatacagccattagaaaaactgcctatcgattgtgcgctacccggcacaggttgggttattttttgccacggcgtcgctgccaggctagcgctactggcaagcagagccagcagcgcaatcgcggttttgttcattttttaccagcgtggaatatcagtcttcacatcggcattttgcgcccgctgccgtaacaggtgatccattaaaacgatcgccagcatcgcttcagcgatcggcactgcacggatcccgacacagggatcgtgacggcctttggtgatcatctcaacttcttcgccaaagcggttaatagtgcgccccggcacggtaatgctggaggtcggtttcagcgccatatgagcaatgatttgctgcccgctgctgataccgccgagaatgccgcccgcatggttgctctggaaaccgtctttggtgatttcgtcgcggttctggctgccgcgcagcgccactacgtcaaaaccgtcgccaatttccacgcctttcaccgcgttgatgctcatcagcgcatgggcgatgtcggcatccaggcggtcaaagaccggctcgccaagtccggcggggacaccactggcaacaacggtgactttcgcgccgatggagtcgccctcttttttcagcgcgcgcatcagttcatctaacgcgtcgattttgtccgggtccgggcagaagaacggattttgttcaaccagcgaccagtctttgatttccagcggaatgtcgcccatctgggtcaagcagccgcggatttcaataccaaatttctcggcgagatattttttggcaatcgcccctgccgccacgcgcatggcggtttcgcgggcggaagaacgtccaccgccgcgataatcgcgcagaccgtatttttgttcgtaggtgtaatcagcatggcctgggcggaaaacgtctttaattgcgctgtaatcctgagagcgctggtcagtgttttcgatcaacaagccaatgctggtgccagtagtaacgccttcaaaaacaccggagagaattttgacctgatccggctcgcggcgctgggtggtatagcgcgatgtcccagggcgacgacggtcgaggtcatgttgcaggtccgcttccgtcagcggaatgcctggcggaacaccatcgacgatgcagccgagcgccagcccatgcgattcgccgaaggtggttacgcgaaagagttgtccaattgtgtttccagccatcacggctccgttattgttgtgtttgcgtgtttacttaatctttataaatcgcgaaatattcacgggccaccagcagctgctctttggtgagcataaacacaccatcgccgccgttatcaaactccagccaggtgaacggaacatccggatattgttccataagatgtaccatgctgttgccgacttcacaaatcaacacgccatcatcagcaaggtaatctgccgcgtttccaagaatgcgacgcgtcagtttaaggccgtcggtgccagatgccaggcccagttccggctcgtgacggtattcgtttggcaggtcggacatatcttccgcgtcgacatacggcgggttagtgacaatcagatcgtactgcactttcggcaaatcacggaacagatcggaacgaatcggaatgacgttgtggatcagaccgtgttcttcgatgttctgttcggcaaccgccagcgcgtcgggagagatatctaccgcgtcgacttccgcttccgggaaggcataagcacaggcaatggcgatgcagccgctaccggtacacatatctaaaatatgctgcggttgcttgctaatgagtccggcaaatttattgttgatcagttcaccaatcggcgagcgcggcaccagcacgcgttcatcgacgtaaaattcatgaccgcagaaccaggctttgttggtcaggtaagccaccggaatgcgctcgttgacgcggcggatcacgcgttcaacaatacggtgtttttcgctggaggtcagacgcgcggtgcgcatatcttccgggatatccagcggcaggtagagcgatggtaacaccagctgtacggcttcatcccacgggttatcggtgccgtgaccgtaccagatatttgccgcgctgaagcggcttaccgaccagcgcaacatgtcctgaatggtttgcagctcatttactgcttcatcaacgaaaattttatccacgtattcctccagggcatgatcgcaataatttcggcggctagtttgccatgaagatgacgataaatcagcattcacgcgcggtgagtgaggaaaaatacgtttaaaacgatcgattgtgctacgagtcgggtaaactgtaggaaaattagaaatagagacagataaatgaaaaagaaaacaacacttagcgaggaggaccaggctctgtttcgccagttgatggcggggactcgcaagattaagcaggacacgattgtccaccgaccgcagcgtaaaaaaatcagcgaagtgccggtgaaacgcttgatccaggagcaggctgatgccagccattatttctccgatgagtttcagccgttattaaataccgaaggtccggtgaaatatgttcgcccggatgtcagccattttgaggcgaagaaactgcgccgcggcgattattcaccggaattgtttttggatttacacggtctgacgcagctgcaggccaagcaggaactgggcgcgttgattgccgcctgtcgccgcgaacatgtgttttgtgcctgcgtgatgcatgggcacgggaagcatattttgaagcaacaaacaccgctgtggctggcacaacatccgcatgtgatggcatttcaccaggcaccgaaagagtacggcggtgatgcggctttgttggtgttgattgaagtggaagagtggttgccgccggagttgccctgaatgctggcagcaaatgccggagcagcgtaaacgccttatccggcctacaaatatgtgataattcaataaattgcaattcacttcgtaggcctgataagacgcatcagagcaatactacgaactacagttcattcaatacatactgaaaacgacacgtcgaatcaatcggttgcccactactggtattcacattcaccacaatatcgtgtagtactttatccgttaccggatgacgagttggcgtaaccgttaccgttgatttatcacaaccgtaagaggtaaaggttaacaattctgataccgcgcggcagtatgctcctctgccatcattatcagaaaaattactgccatcacagagtctgccgccttccatcaggtaggtcgaaagcgtggtggtcactgttgaccccgtggactgaattcgtaacgccttattatggctgacataattttcactccaggagatatcgtatgaagtgaccggtatcgttgggcatattgtgttatgcactgtaggggccgtatagcttccaaatccgggtaaatctgtataggaataaaaggatgcgatccaagggcaaccataatcatcagatgcaacggtaattttaaacgtcatatatgcacaacgaaaaattttcgtatctatgccagggcaatttgagttattaattgtatcaaagtcagtcagtaccaaagttggagctgaacccgacccagaccaggaaataacccgcaacgtatcgcctttatacgcaaaagaatcatatttcccatatgtaacctcctttggcgttatcaccgtaacattgaaaacactgctcgctacagcaccggttaccttgtccatggcataataaactctcacactgtcaaaactcgcactcataagtttatctccagcataactcttagatgcgccgacaacactcagaacgagcagcattaggctcgcgaaaattatggtccattttttcatttcagaaatactcaaaggttgccgtcactgtggcactaaagtctccggacgttacatctcgcccgctctttgcctgtaaccaggtattaaaatttaggctgttatttccctgattcagcgggagcgtgacgcctgttgtattgttgattggcaccgatgtgcctgccgcagtttcaataccaatcccagcgccggatgctgatgacgaggagtcaaaggccagaaagccgggtagagcactatcttctgttcctgtcaacgttactttgacattaaacaatgtagaactatgacaatctttcaattgaaacaccaatggcactcgctctgactgcccaaggttcattaaatcgctggcggcaatggcaggaaaatgtacttctgccaactggctaccattaatcactggcgtacacgatttactgattaaattgccggtaaagtgcaaattatctcctgctattgtggttccactgcccagcaacatcaggctactaataaaaaacaacgtacgctttttcttcattggtaatctacctgtaacgtggcccaggcctcaaagtccgcctctggcagaacgacaccactcttttttactggcacagccgttaacaccggtaaatcggtttcattcaccataagtggcgtattgatcgtaaaactctgccctgcctgtttgagctgaatgcctaaaccagtgatattgctgcttactgcagcattatcaaaatcgcttagtgtgccactccagctcaaggtcatttccattaatgggtcgcgaaccgccgtatcgcaggtaatggaatacggcacggtttgctcataattgctgccattaatgtcatcaataagcacatcctgaaaagttatttcaatggtttgagcgttgctaatcgtgcagttaggcggctgcactaaataaccgtgaaaagagacgtttgagagtgccatcgagcaaaagccccacagcaaaataagcgagatccgtttcattggtaatccaccacaattgtggcactggcgttaaattcagctgccgctaacgttgtaccactctgtttcaccggcacagcttccagaacgggaactcccgaggaaaaattaaatggcaaccatgagccagaggttaagtcgagtattgtgtgatcactacttttctgaacccgaataccaaacccaggaatacccgtgctgataactgtttcaccgttaatcacgaccgttgtcgcctgcatctgtagacgcaggtcatccattgccagattgttacaaacaagcgagtagtcaatgggacgtttataatcaaccccattgatcttattaatgaatacattaccaaactcaactgccgcaccatttaccgtacaaggaggaggggcatcgacaagcacccgtaaattcatacttactgacttactcgctgcaactgcaaagccgctaccaacacaacatatcagtaacccagttaccgcccagacagaacaagatcctttcatactggctctcccggcctcagcctttgcggctctgctcttcatcgacctggcaactgttaccgttgcaagtgaaaaagagcggcatccgagcgccatagtcgttgacataggtcagtaccggcacgctacccatcttcacattcagcggtgcagaggttttcggcgacatcactattggcgagaaaccggctgcaggattgccatttttctgtgtgctggcattactgaaaatgacgtaatacggcgtcgggttattgacggtaaattcctgaccgttgcgggttaaagtaaccttatattgccaggggtttttcatgctgacgttctccagcgccttcggtcgccagaacaacttaatacgcgtttgtagtgctatttgcagcgtgttggctttgtttgattttggcgggatctcacgcacgttgaagtagaacaggctttcacgatcggcaggcaatttgttgatatccggcattccctgcacttttacctgcccgttcatcattgaatcgatgcgttgcaccggtggcagaacagttaacggtgaactgatcttgttacccttttcatcttcgatccagctttgggccagataaggcagtttcggatcgttattgcgcaacgtcacgctgattgatttgtcgctttcattaaatatcaaacgggtacgatctggcgttacagaagcctgggcgacaaactagcagcgctaagcagtaacgctagcgtcgtagcacccaatttggcagagcaaagtaaatcagacatggatcattccttaatcacgttattggttagctgaaacagaaacagggggattggtgggtgtcacctgttgcgtctgctcctgaatgacaggctttatgtcatcaggaacaaccggcgcgacgttgcctttatgctggcatggcagtaacaagccgttaaacagatcggcaggcagcgggtccggcaggttgatatcgcaatgcgcaacaccactccagaacacactcatgtgttcgccaggtttcaccccagccagataaacattgccgtcatcatcgacaaggcccactgtctgctcgttatcattttttacttctgcgccaaacggaggatggctgccgtcttgtaaacgcagcaccgccatcgctttttgaccactgatgacggcaaatttgcggtagccaatcgccccttcagttagcgtggcttgtaccaccgactgggttgcttcggcgttttccggcagtttgttgaggtcgatatacgcctgattgcggtaatagttattgacgtcagaaacgacggctttaccaaacatattggtataaacagcagcaccgttaccttctaccggaacatcggcaacgccatcggcatcaatcaacaagcgtgtcccgcccatattctgggtacggtgaagtgcgccaccgtgggcagtaagcgttgcgccgccctgtaacgacaagcccgcagaggtgtattgcccttcatggtagttcgcactgaggtcaacctgcgccagcgaaccatcatggctgtaatagccgtcaacgctggtgtgtttgtcactggtgccgacgttcaactgatagtgagtcgcgtcatcgacacggctgaaataaccgacctgactgctgtccgtcccactgccatagttaccgttatagctaacggtactgttgtcaccccacggcatactgagcgaaatgtacatgcctttgtcggcctggttgtcatactcgtaacggtagccagtcatcgagatgctgacattacgaatactgcccatattgaaatagtgcgagagcatgatgttgtagtttgtctgctcctcgcgatcccagtaggtatggcgggtatagttgagataaaccgaaacacccgcatcgcggaagttctggttataagtggcagtgtacatctctttgtcgttgcccgtgcgtaccattccgctgtcactggcatccagatactcgctcatggtcataaagttctcttccgagaagcgatatccagcaaaagtaacgcggctgttgagctggtcaaagtctttggaataactcacacggaaggagttaccgtccagcgaacctttgccataagcggtgtctttatccagtttggtgtgcgagtgagtaacatcaaacgcgaccgcgccgaatgtagacaaatcgcgaccgacgccaagcgccgcagactgatagttttcatctcccagtgcgccgccatataacgaccagccgttagcgatcccccaggaagcttcagcaccagaaaaaaattcaccctcgacatggtgtccccactcttgcggacggcccatcatgatcttatagcgaacctgacctggacgagtgaggtatggcatcgaggcggtgctgatgtcatattcctgcacctggccgttctgttcttcaatgcgaatatgcaacgtaccggagacagaatcaccaagatcctgaatacgaaacggtccagccggaacctgcgtttcgtaaatcacacgccccatctggctgacggtcacttttgctgtggtgtgtgccacgccggaaatgtctggcgcgtagccgcgcagattgggaggcaacatttgatcgtcagtactgacactgccaccaacatagttaaaaccatcaaaaatatcggatctgaggtaatcctcgcccagcgccagtttggcttttaatgatggtaacgcccgctaggcatagtagcgactccactcccattttttttgagtttcatcgccgctgaattcatcgtcatcattactgcgagtatgttgatagttagtctgccagtcagcacgcatacgccacggccccaggttaaccccgaccgtcccgttgccgctgatctcgttactatcatcaccgccattttcttcgtgccgggtttgtgcgttgatgctgtagtccgcgacgatcccggagatgccgtcatcccaacgtgaaggcggatcccagtcgggataagtatattcgaggtaagcctgtggcagtgaaatgactaatgcggactggcttaaatcaaccttaatttccatgccttccagttgaccggatttcaggcatttagcatcgtggctccattgcagatttttcgccacgtcttcttttaaaccaaactgcgctaccagttccggtgtcagacaagcatagcttttgctcgcgtcatcttcaccagcataccagtaaatatcgtactcttccgccaatggctgtttatttagttgaacctgtaaattgtattttccgggctcaacatatccctggctggaaaaacgcttcagatcaatttttgtgtcgccttttaattccagaaaacgggaatcaaactgaatgtcgtcttcagcccagacactgctataactccctgacattgccagcgcaatgcaccacggaagaatccgtaatcgaaaaagagaatggtcaggcatacacgtttctatccgtttttattcttgttcggtcaaaatccatttaaatcccccatagcagtgtcgctatgggggtatgccttacaggtaagtaatctggaaggtggtatttgcttcgaaattacccagatctggcgcatcagctgcgccgaccagccaggctttaaagttcagtgtctgcttcgctttgcctttattggtagaagtgtctttcactattttctggtcaatacccatgccgcttttgtaagaggtacccagagagtcaccgatcgccaggctaacattgttaaatgccgcacaggtatcggtattgaaaatggtgtaataattgccgctatttgcagaagaaacggtaccagtaaaggtagtggtcattgtttcctgagtatcaaatacgcaatcttgcagacgaatctggaaacttttcggcgtggtggtgccgttatttttcagtttttcggcaccgatatcacccatatcaacttccagtttgtgatcgtccggaacgatagaacacactgagtcttcaatggtgccgtaaaaacgtgcagtaccgttgttacccgcagcgattgttgccgtagaggtgaacacgcccatcaccattgccgcagcaatagctgttttaacaaacttactcattatttgtccttaaactataaataattaaaaatataaacattgcaatacattgattcagtcaataaccaatgtttatacccagccattgaatacggcatgcgatccaaaaagaacaggtcgtagaaaattgtattcgttggtgtggggccgcatagtgatgtttccacacccctgatgcaatttaattttactaaagagtaaatgtagatttaattaatatattgacagaagaaaggttatcttaaggacatccttaaaaaatacggaataagtatttagaaaaaatagaaagtatatcaataatgaatatcaacagcttaaaaaacaaacaatgaacatataatgcgattggcatttatccacttttgacaatataatatataaacactatagccagaatttaatcaagtttcaattacatcctgcctgattattcaactctattttctctattatctgtattaataaatgacaatgagtgtcaaacagacattattcatttcaacatgtaactttgggcaaaatcaagatacgcgcagaagaataatttccgaatgaaagtagaaagtgttttatttatagatggggagagtcttcgatagtagtgagattgacagatatccgctgcctgatgagcaattatgcccaatgaatctacctcattgggcataatttggaactcatcagatagcttttgccatcttcagattacacgggctcatctgccagttgaatgtgccgtttccgctttcatcaagcgttacgctggcaatggccgaggtggtaaacataggcggcgtttcgcccggacataactcggcaaccagatacccgactaacggtaagtgagagatcaccagtaccgaagcaacaccttcattggtcaacgcctgcaaataggcactgaccagaccaacatcgccgcagggcgttaactccggcagaacttctgcactggaaggcaggttcagacaatcccctacttcttccagtgtttgctcggctcgcaggaacgggctcaccagaacgcgttcgatttccactttttgacctttcagccagttcgccatcaggcgagattcgtcacaaccattagtggtcagaggacgaaccgaatcactggcggcatcaagggctgcgtcgccgtgacgcatgataaaaacttgcatattgcaccgcttttgttaaccagattcgtccgttttctttcatctgaaaccagagaaagaaaacggtggccggcattgtgccttatccattcaccgaatgaaacgctgttttttacctcaatggcgtaagtatagtcaatatgcgtttacattttgaccaacactccgccattcagcgcggattcatatagctttgaccttcttattgaaggtcagttgcagttgttttccaaaaactttccccacgcgcgcccatctcgaccaaacgctcgcaaggggtaaaacgggaaccatactgcgtggccagtcgttgcattattgcaaccacttcgcccgcgccgagagaatcgatatagcggaacggtccaccgagaaatggcggaaaaccaatgccaaataccgcgccaatatccccgtcacgcacgctacggataacctgctcatcaacacaacgtactgcttcattcagcatcaacatcacacaccgttcagcaacctgcggtgcggagagtcgcccctgcccttgtgcgccaatgagcgggtaaatggcgggatcgacctgttttttgcttttacgccctttctgaccataaagatagaaaccccgaccattttttctgcctttgcgatcgtcgttcaaaattgaagaaacaacatttgcaggcgcgctaaaacgttctccataagcggcttccagtacaggaataattttagtcccggtgtcgattcctacctcatccaaaagttggattgggcctaccggaaaaccaaatttcactagcgcggcatcaatgtgctctacccgttcaccttcggtcagcatgcggatagcttcattaatgtaaggcgctaagatgcgattgacgtaaaacccggctttgtcacgcacgacaatgggcgttttgccctgttttttcgccagttttaccgtagtggcgatggtttgcgccgatgtacccgcatgaggaataatctctaccagcggcattttttccacaggactgaagaaatgcaggccaataacttgctcaggtcgcgcggcgtgagcggcgatatcaccaatcggtaaagatgacgtgttcgaagcaaaaatggtatgagcggcgcaattttgctccacttccgccaccatctgttgttttaattcgagattttcaaacaccgcttcaataatcagatcgcgatgggcaaagccgcgatagtccgtcgttccggagattaatgccagctgtttgtcacgttcgctggctttgagatgacgacggcgaactttgccctccagctgatcccaactgtacttcagcgcatgatttatgccctgcgggttgatatctttaattctgaccggaagccccgctttacaagcagtgacataagcaataccgccgcccatcaagccaccacctaaaattcccacgctgtttaatggcgcaggcggtgcatcactaccgggatctttcttcacgtccgtactggcaaaaaagatactacgcaaagcttgcgattgcggcgtcatcgccagttcgccaaaggcgcgagcttcagcgtcatagccgctgctggtgccctgcgctaatcccgtttcaacaacctccaggatgcgttctgtcgccggataattgccttgagttttgtgttctgttttcttgccgaccattttgaacagcagcgcacgacctaacggccccgccagaatacgctcgcgtacaggtagagggcgggaagatgggcgatccttcttcgccagctcaacagcggcttccagcaaaatggagtgcggaacaacgtcatccaccagccccagctttaatgcctgtttcgcccgaagttgttttccggtgagaatcatctctaatgctgtactgacgcctatcagacgcggtaaacgctgggtgccgcctgaaccgggtaacaatccaagttgtacttcaggcaaaccgagcaccgttttaggatcgtcagtacaaacgcgaccgtggcacgccagcgccagctccagcccaccgcccaggcaagcgccatgaatagccgcgataaccggaatgggcaaagcatgaatctccgccatcaactgttggccctgccgcgccagtgcttccgcttcttgcgccgttttgcagttgccaatcatgttgatgtctgctccggcgataaaattgtccggtttcgcggagataaacaccacgccgcgcaactctttgttttcacggagttgcttaataatggcgcgcacctgcgaggcaaattccgccttcagggtattcattttctcatccggtacatcgatggtgatgatagcaatgttgtccagacgaacattaagagtaaacgctgatgccatttccattattccgcctccagaaccattgccgcgccaagcccaccggcagcacaggcggtaactaaaccaaatccaccgccgcgacggcgaagttcatgcaatgtctgggtaatcatccgcgcgccggtcgccgcgaagggatgcccgtaagcaatcgaaccgccaagcacgttaaatttgctatcgtccacttcgccagtggcatgtgcacgccccagtacttcacgagcaaaacgttcactacccagcaactgaatattcgccagtgtctgagctgcaaaggcttcgtgcatatcgatcaatgtcagttcgctcatcgtcaaaccggcacgttccagcgccagcggtgttgaccaggctggaccgagcaacatgtcctgccagacatcaatcgcagtaaatgcgtagctgcgcagataccccagcggcaccagccctaattctttcgcccgggattcagtcatcaggatcaccgctgccgcgccatcggtcagcggcgtactgtttgccgccgttaccgttccgtgtttgcgatcaaacgccgggcgcagctttgcgtaatcggcaagcgaggaattaccgcgaatattgttgtcttcgacaagcggttgtttataaggagggataaaggcagtcatcacctcttctttgagttttccgtctgaccatgcctgagcggcacgctgatgcgaacggtgcgctaatgcatcttgctgttctcgggtgatgccgtaggttttcgccatttgttcggcggtgtcgcccatccgcaagccagtagaatattctgctaccgcaggcggtacgggcattaagtcgcgcaaacgcaggcgagagaagagtttcaggcgctggctcatggttcgagctttgttgacatcaaccagcacgcgcgccagttttttactgacgccaattggcaatacggaagaggaatctgccccaccggcaatccccgctcggatagttcccgccatcaggctttctgcgacgtttgcaaccgcctggaaactggtagcgcaagcgcggctgacgctgtaagcatcggtatgcacattcattccggtaccgagaacaatttcacgcgcaatgttgggggcttcaggcatttgtacgacctgaccaaagaccagctgttcaatcacttcagcggggatctcgctgcgtgccagcagttcgcctaccaccatcttccctaaatcaaccgcgggaatgccatgaaaagccgtcgcctggcgggcaaaaggcgtacgtaaaccgctaacaatggcgatacgatcgccctggcgggtaaccagcggtaaaacctgacccataacactcccctgtaaaaaaataaataaagtggtctgacctgatcatagtcttaactatttttttacatttagccaagcggagaaaaaggaaagtgggagctatgacacagtgaagacaggagaaagaaaagaaaacgcccctgccagcaactgacaggggcgaacgtacccgagaggaattaacgcagacccagctggaagatcagcatttcagcttcgcaggcaaaagtgaaatcgatatccaggcgcacaccgtcagactcttcagtgaaagtcggggagattttgcacggttcggattccacgctacgggctttttcagtcagcgccgccagcgtttgttctgcttctgcgcggtttgcaaacacgcggctgtaagacgcggtgcagtcggagttgtccataatggtgccaacatccatacagcagcaaaccggggtttcatcagcactacatttactcatcgttgatttcctctgtatgtgcacccaaggtgccagataaacgttgtggatattttacgcttccggaaagtgctgctccagttgttaattctgcaaaatcggataagtgaccgaaatcacacttaaaaatgatctaaaacaaaattcacccgaatccgcgagtgcgcaacctccaaattttgccagctggatcgcgtttcttagatcatatttgaaaaaagatggaaacatacttgcagcattccagctggtccgacctatactctcgccactggtctgatttctaagatgtacctcagaccctacacttcgcgctcctgttacagcacgtaacatagtttgtataaaaataaatcattgaggttatggtcatgagccagaaaaccctgtttacaaagtctgctctcgcagtcgcagtggcacttatctccacccaggcctggtcggcaggctttcagttaaacgaattttcttcctctggcctgggccgggcttattcaggggaaggcgcaattgccgatgatgcaggtaacgttagccgtaaccccgcattgattaccatgtttgaccgcccgacattttctgcgggtgcggtttatattgacccggatgtgaatatcagcggaacgtctccgtctggtcgtagcctgaaagccgataacatcgcgcctacggcatgggttccgaacatgcactttgttgcaccgattaacgaccaatttggttggggcgcttctattacctctaactatggtctggcaacagagtttaatgatacttatgcaggcggctctgtcgggggtacaactgaccttgaaaccatgaacctgaacttaagcggtgcgtatcgcttaaataatgcatggagctttggtcttggtttcaacgccgtctacgctcgcgcgaaaattgaacgtttcgcaggcgatctggggcagttggttgctggtcagattatgcaatctcctgccgggcaaactcctcaagggcaagcattggcagctaccgccaacggtatcgacagtaataccaaaatcgctcatctgaacggtaaccagtggggctttggctggaacgccggaatcctgtatgaactggataaaaataaccgctatgcactgacctaccgttctgaagtgaaaattgacttcaaaggtaactacagcagcgatcttaatcgtgcgtttaataactacggtttgccaattcctaccgcgacaggtggcgcaacgcaatcgggttatctgacgctgaacctgcctgaaatgtgggaagtgtcaggttataaccgtgttgatccacagtgggcgattcactatagcctggcttacatcagctggagtcagttccagcagctgaaagcgacctcaaccagtggcgacacgctgttccagaaacatgaaggctttaaagatgcttaccgcatcgcgttgggtaccacttattactacgatgataactggaccttccgtaccggtatcgcctttgatgacagcccagttccggctcagaatcgttctatctccattccggaccaggaccgtttctggctgagtgcaggtacgacttacgcatttaataaagatgcttcagtcgacgttggtgtttcttatatgcacggtcagagcgtgaaaattaacgaaggcccataccagttcgagtctgaaggtaaagcctggctgttcggtactaactttaactacgcgttctgataacgcgttcgcctggataaagtcacctgcatagcaggtgactttaactcccccacttcaccgaaagtagtgtcctcattgcttacctcctgagttttgcaaacagcctgttggcagcttgccctttcaaatcaataagcggtatccacagacaaacctgaagggaaaggcatattttcaggcgttctgctcgtccttctcaaagagtttacttttctgcatttccaggatactccccgttactttattcgtaccccttataatggggtgttagccagccagacccggcatgattactgcccccagtcgtccatgatccggggggtgatgtcaccgggtctggtggggcgctggtaaccgctaataggggtcaggtcaggcacttttgccgggaccgtctgtaacgtggatgccggtacctgctccccgtggttatctggttaacccatatacaagggagacagaatgaccgaatccagcgattacgaatccgtccaggtctttatcggcgttgatgtcggtaaagatacgcatcacgctgttgccattaatcgttcaggtaaacgcctgttcgataaagcattacccaacgacgaaaacaaactcaggtcgctaatatctgacctgaaacaacatggtcagatactgctggttgttgatcagccagctaccatcggtgcgttacctgtcgccgttgcccgctcagaaggagtccttgtcggatacctccctggactggccatgcgccgcatagccgacttacacgccggtgaagctaaaactgatgctcgtgacgctgccatcattgccgaagctgcccgtaccctgcctcacgcgctacgcacgctgaaactggctgacgagcaaatcgccgaactctccatgctctgcggcttcgatgatgatcttgccgcacagacaacgcaggccagcaaccgtatccgcggccttctgacccagatacatccggcactggagcgcgttctcggtccgagacttgagcacccggcggtactcgatcttctccagcgatatccctcaccagaaaaactcgcttcgctgggcttcgctgggtgagaagaagctggcagcccagctctgcaaacttgcgcctcgtctgggtaaacgccttgcagcagacatagctcaggcactggccgaacaaaccgtcgtcgttcccggcacgaatgccgctgccgtagtactgccacgtctggcactccagctcatcacgctgcgtaagcaaagagacgaggtggcgcttgaggtagaacagcgagttcttgctcaccctctttacccggtcctgaccagtatgcccggagtcggtgtcaggaccgcagccagactcctcaccgaggtcgcctgccgcgccttcgcctctgccgcacatctcgctgcttatgctggccttgcgccggtaactcggcgatccggctcgtcaatacgcggtgagcatccctcgcgacggggtaataaagctctcaaacgggcgttgttcctgtcggccttcgccgcgctcagggatccgctctccagggcttactacacccgcaaaatgagtcagggaaaacgacacaatcaggcgcttatcgccctggcgagacgacgctgcgacgttctgttcgccatgatgcgcgacgggactttttataccccgcaggggtcataacatgcttgacaacttaataggggcaccccctggctattgtgcgctcatacactcaaattaaagataggttctaaataaatgagcgttttttgatagtctatttcattaggtaggtaatgactccaacttattgatagtgttttatgttcagataatgcccgatgactttgtcatgcagctccaccgattttgagaacgacagcgacttccgtcccagccgtgccaggtgctgcctcagattcaggttatgccgctcaattcgctgcgtatatcgcttgctgattacgtgcagctttcccttcaggcgggattcatacagcggccagccatccgtcatccatatcaccacgtcaaagggtgacagcaggctcataagacgccccagcgtcgccatagtgcgttcaccgaatacgtgcgcaacaaccgtcttccggagactgtcatacgcgtaaaacagccagcgctggcgcgatttagccccgacatagccccactgttcgtccatttccgcgcagacgatgacgtcactgcccggctgtatgcgcgaggttaccgactgcggcctgagttttttaagtgacgtaaaatcgtgttgaggccaacgcccataatgcgtgcagttgcccggcatccaacgccattcatggccatatcaatgattttctggtgcgtaccgggttgagaagcggtgtaagtgaactgcagttgccatgttttacggcagtgagagcagagatagcgctgatgtccggcagtgcttttgccgttacgcaccaccccgtcagtagctgaacaggagggacagctgatagaaacagaagccactggagcacctcaaaaacaccatcatacactaaatcagtaagttggcagcatcacccattaggtaatatatatttgtaacaaatcaatcaaaatggaataaaatcatgctaccatctatttcaatcaacaataccagcgcaacttacccagaatccattaatgaaaataacaatgatgaagttaatggattagtacaagagctcaaaaacctttttaatggtaaggaaggaataagcacctgtattaaacatctacttgagcttataaaaaacgccatacgagtaaacgacgatccttaagatttaatattaataattcctcagttacttatattgatattggctccaatgatacagaccatattactattggtatcgacaaccaagaaccaatagaattacctgcgaactataaagacaaagaactcgtccgtactatcattaatgacaacatagttgagaagactcatgatatcaataacaaggaaatgatcttcagcgcattaaaagaaatatatgatggagatcctggttttatcttcgataagatatcacacaaactcagacatacggtaacggaatttgatgagagcgggaatagcgaaccaacggacttatttacctggtacggtaaagataaaaaaggcaactctctcgctattgtaattaaaaataaaaacggaaatgattacttatctctcggttactacgatcaggacgactaccacattcaaagaggaattcgtattaatggtgatagtctcacccaatattgtagtgaaaaagccaggaatgcttcagcaatgcttcagcgtggtttgaaagcagtaaagctatcatggcagaatcatttgcaacaggttccgatcatcaggttgtaaacgagctcaacggggaaagactgagagaacctaacgaagtttttaaacgtttaggtcgagcaataagatataattttcaagtggacgatgcaaaatttagacgcgacaatgtaaaagaaataatttctaatttattcgctaacaaagttgacgttgaccatcctgaaaataaatacaaagactttaaggatctcgaagataacgttgaaaaaagacttcaaaatcgccaggcgaaatatcaaaatgaaattaatcaactatctgcgccaggtgttaattttgatgatatttaaaattatttttccagttttttgatttttcaacgcctgaatatcggaaatagtcagtgacgaacatcagtatttttacatcattacgtccgggtcattgtcggtttatctccttttacttgtggtaattgagggataacaacaaaaaaggtgagttttgcgactcaccttttttatttgtttcttattcagaatcaatatcttttaaatcatcctgaatcgcttgtgcgttcggattttcctgcggtttgagttcgccgccattagcgatgaaatcatgacgctggaagtacgcttcgcgcaccataatataaggatcggacgactgacgcagcagaccatcggaatccagcagctgagcgcgggtttcgatcccttcaagcgtccatttacccacagacatcggccaggtcagccaggaaagaaccgggtaaagaccatccgccatatcaccaccgtcatcacgcagcgtgaagctaccgtagaacggtaactgaacgtaaggcccataacccacgccataatgaccaagcgtactaccgaagcggtgaggttcagtccgttgcagtttcgggttcgccatccctgcaacatcaataaagccgcccatccccaaaatggtgttcaggaaaaagcgggtaaagtggaccatcccctgataagggtcgccctgcaagaagtagttaaccatcaccgcaggttcttcaaggttgccagtaaagttgctcaaaccattacgcgccggttgcggaacataatcacgccaggcgacagcgaccggtcgaacaatatacgggtctaatacgttgaagttgaagttgtacatggtgcggttgaacccttctaacgggtcagaacgcccttgctgatctgtaccggaactcgcacaccccaccagaagcgtagttcccagagcaagcgccgacaggcgaagcttcataaatgtctccctgtttttttatggcttatgcagtttgccatccatgacggaacgataccgtatccgcctgtttaggtgtgggcgattgtaacagcacgtcaactgatgtccagacgccctgatttgctgatttgatcatagcctggtaatcgccgccctgtaggctacttgattctatagaaacagaaaaaggcaaacgcagccttttctacattttcagagtaactcccgccagttgcgagcaaaaaagccgctacgctttagctatacgtgctaattcaagagaagagaccatggacaacgacaaaattgatcaacacagcgacgaaattgaagttgagagcgaagaaaaagagcgcggcaaaaaaatagaaatagatgaagaccgactcccctcccgggcgatggcaattcatgagcatatccgccaggatggtgaaaaagagctggaacgcgacgcaatggcgctactgtggtcagccattgcggcgggtctgtcgatgggcgcttcgttactggcaaaagggatatttcatgtcgaactggaaggtgtgccgggcagcttcttactggagaatctcggttatacctttggttttattatcgtcataatggcccgccagcaattatttaccgaaaacaccgtgactgcggtactacccgtcatgcaaaaaccgacaatgagcaacgttggcttacttatgcggttatggggagtcgtgctgctgggtaatattctcgggactggtattgctgcgtgggcatttgaatatatgcctatcttcaatgaagaaactcgcgatgcatttgtcaaaatcggcatggatgtgatgaagaacacccccagcgagatgtttgccaacgcgatcatttccggctggctgatcgccactatggtatggatgtttcctgcagcaggtgcggcaaagattgtggtgattatattgatgacctggcttattgccctaggtgacaccacccatatcgtggtcggttctgttgaaatcctctatctggtgtttaacggtacgctgcactggagcgatttcatctggcccttcgcactacctactttagcggggaacatctgcggcggcacctttatcttcgcgttaatgagtcatgcacagattcgtaacgacatgagcaacaagcgtaaagcagaagcacgccaaaaagcagaacgtgcggaaaacattaagaaaaatgataaaaacccggcataaatggcgagggtttaagcaatcaagcggcagcgtacttaccccgcactccattagcgggtatactcatgccgcattgtcctcttagttaaatggatataacgagcccctcctaagggctaattgcaggttcgattcctgcaggggacaccatttatcagttcgctcccatccgtaccagtccgcaaaatcccctgaatatcaagccttccgtatattcacggttcgtcatggttcgcgtcagatcgttgacagccgcactccatgacgggtaaaaagtggataaaataattttacccaccggatttttacccatgctcaccgttaagcagattgaagcagcaaagccgaaagaaaaaccataccgccttctcgatggtaatggcctgtacctttatgttcctgtatccgggaaaaaggtatggcagcttcgctacaagattgacggtaaggagaaaatcctgaccgtcggaaaatatccgcttatgactttgcaggaagcaagggataaggcatggactgcgaggaaagacatctcggttggcatcgttccggtaaaggcgaaaaaggcttcgtctaacaacaattcatttagtgcgatttacaaggaatggtacgagcacaagaagcaagtctggtcagtaggctatgcaactgaacttgccaaaatgtttgatgacgacattttacccatcatcggcggtcttgagattcaggatattgagccgatgcaactgctggaagtaatccgcagatttgaagatcgcggtgcaatggagcgagccaacaaagcccgcagaagatgcggcgaggtttttcgttacgctattgtcaccggaagggctaaatataacccggcacctgaccttgcagacgccatgaaaggataccgcaagaagaacttcccgttccttccagcagaccagatgcctgcattcaacaaagcactggcaacattttcaggaagtatcgtatcgctcattgcgaccaaagttttacgctacacagccctaagaacaaaagagcttcgttccatgctatggaagaacgtcgattttgaaaacaggattatcaccatcgacgccagtgtgatgaagggacgcaaaattcatgtggtcccgatgtcagaccaggtggttgaacttctcactacgctaagctcaatcaccaaaccagtctcagagtttgtttttgccgggcgcaacgataagaagaagccaatctgcgagaacgcggtattgcttgtgatcaaacaaatcggctatgaaggtctggaaagcggtcacggattcaggcatgaattcagcacgattatgaacgagcacgaatggcctgctgacgctattgaagtgcagctggcacatgccaacggcggatctgtgcgcggtatttacaaccatgctcagtatctcgataagcgcagagaaatgatgcagtggtgggcggattggcttgatgaaaaagtggagtaatccggaccgtacttctttatccaggcataaaggctgtgggtagtgatatcgagacgtgttgcaacgctggcaacagaataaccgcgatcaacaacctgtttgactgcttcagttttaaactcttcgggataacgcttaccgctcatgggcacctctctttaagccatcttaaatgactctgaggtgtctgttaaacccgtggcgattcaaaactgcgtgttacgttcgccctggactgttgcgatcgtgaagccatagactgggccgcaagcacgggaggttacgataaagcgacagtgcaggatgtcatgttaggagcgatagaaaaacgctttggcgataaagtaccggaacagtccatccagtggctgacagataacggttcagcgtatagagcgcatgaaacacggcagttcgccagagagttgaatctggagccctgcacaacggcaatcagcagtcctcagagtaatggaatggcagaaaggttcgtgaaaacgatgaaggaagactacatcgcgttcatgccgaaaccgaatgtaagaacggcattgcataatcttgcagtggcgatcgaacattacaatgaaaaccatccgcacagtgcgctgggttatcgctctccgcgagaatatcgacgtcagcgggtaacgttaacttaagatacaccccctgtctggaaataagggggcaagaacaatgatcagattccctggtgagtaagaattttactttctgaactcctctgagagtattgacttggagaaacaccaaaataacgtctaaatacataagtaaagtatgagacactggcataaccacagaccttagctactttactaataggataacaacgagtgctgagtaaatattcagccatttgcatcctctcatcaagtatgatcttactgaatgataccccctcttctttcaatttcatctttagtaaactttcgctgagatataatcttgatgatatatccttaagacgccatggtgcagataaatccgtatgaataatcgttttaactttagccctgtgcttttcaaacatccaaacagaaatactccaaattgtttttcagaagaaaatgcagagagacatgtaaaagcaatagactcatcaaaaatttctatgtattcagcacagtgattagcccaactaattaatcctttaattaaactgaagtcagcaaagtttatttttaaataagatggatattccctacaatcagaaatatcccttaagttattagctttcaaatagcgactaataaactcagcgccaaaatccgccactatcactctttcaggatatgtcaggaaaaaatctctagagctagagtcgacaagtacagatgaacctctctccagaaacacactctcttttccgaaataaacatcaaaggactccaaaatcaatataactgaacatgtagttgccatatcatccacccaattggtaatgactccaacttattgatagtgttttatgttcagataatgcccgatgactttgtcatgcagctccaccgattttgagaacgacagcgacttccgtcccagccgtgccaggtgctgcctcagattcaggttatgccgctcaattcgctgcgtatatcgcttgctgattacgtgcagctttcccttcaggcgggattcatacagcggccagccatccgtcatccatatcaccacgtcaaagggtgacagcaggctcataagacgccccagcgtcgccatagtgcgttcaccgaatacgtgcgcaacaaccgtcttccggagactgtcatacgcgtaaaacagccagcgctggcgcgatttagccccgacatagccccactgttcgtccatttccgcgcagacgatgacgtcactgcccggctgtatgcgcgaggttaccgactgcggcctgagttttttaagtgacgtaaaatcgtgttgaggccaacgcccataatgcgtgcagttgcccggcatccaacgccattcatggccatatcaatgattttctggtgcgtaccgggttgagaagcggtgtaagtgaactgcagttgccatgttttacggcagtgagagcagagatagcgctgatgtccggcagtgcttttgccgttacgcaccaccccgtcagtagctgaacaggagggacagctgatagaaacagaagccactggagcacctcaaaaacaccatcatacactaaatcagtaagttggcagcatcaccagccttcttgaggctaccacctgttttcaggtgtcattcagacgtgatttgccccagattgggaaagcacgcttttttctcagctatcgtcctcttattttgccgttacatttctttttgcactctaatgattaatttacaataataatatcggtaattattgagtaataataaattgattattgcaaatgtaatttaattccatcttcgcgttatattccaatctttaatctccgcatggaacaagttgcatgcgtgactatattaagacaacttataaccaccaaaacatttgctttgcaagcaaaaacagtgaccattgactctaagaaaattccgatctattgttagggtcatcaaagttacttaacagtattccgaaatgaaaatacaaagcaagctaattgtcttattaaacattattattgcatttatattatttgagcttttagctcaaaaatttggtttgagtacattattttaaagcaagataaacaatatcgggcactctagtttttataattaacaattaaacgtccataaaatgttatttacttttcttcgctattgtcatatcttaatatagtggcttacgccactctactttcatcacattttgtacgtttatgtactcgccatgaagctctttcatggcgattttttattcttaatccaagaacatactccctacctatagcaaaatcacttttttaacaaaagaataacgtatttaggtaatcattacgaatttaccctataggtgctactggccattcaatatccggtgcagttgatgtatcaacacggttcagcaacacccgatactttttccaggcttccagcaacaaggtttctttctccgttgcgatctccagatccacagcatcctgaagcggcgctatatgctcactggctacctgcatcaggctgttttttgtttcttccgcctcccggatccggaacagtttttctgcttccgtatccttcacccaggctgtgccgttccacttctgaaactccccttccggggataaccaggtgacattttccggtaatgagccgagttcagaaataaataacgcgtcgccggaagccacgtcataaaccgttttaccccgatgatcttcaacgagatgccacgatgtttgcaggcagacctgtatgaggcggaatatatgcgtcaccttcaccaataaattcattagttccggccagcaggttataaatttttatggtccgtgcttgttcactcattctgaatgccattatgcgagcctcacaatatagttaaatgcgatgtttttgacggtgttttccgcgttaccagcagcgttaacggtgatggtgtgtccatgtgaaccaatcgcaacagagtgcgtatgagcaccaataccgacagtatgcgcgtgtgcacccgcagatgctgctgtgccggacagtgagtgtgtatggtttccttctgaagatgatttacctacccattgggaggtgccactggttaatgagccactgataccaacctgattagtcccgctaacttgagtactccctgccggaaacattccagtaggttgactcccgctattcgttctgggcccagtctgactatgttggtgggccccagctgaacttgtagagccgctcagactgtgcgtatgcgccccggtgttattcgtggatttagtgccgtaatcaaacgacgatgtggttttcgtccccaaatccgtactggatgcgctggcgctgtgggtgtgcgatttaatgccatcctgttcctgagacaatacggcacgaccactggcgggcttgcccttaatcgtccagccacgcatatcagggatcacgcctgacggataagcggctgcaagtttcgggtaagcagatttgtcaaaagtctgcccctgcatcagggcataaccagacggaacggtatctgatggccacgggattggtgcaccgactggataaaactctgcaggaggatgagccgaggtgtaaagctgcgcccacggcgaccagtttgcgtcggtcgtatcccgtcgtgaacgaataaatgccggagcatgagcaccgcttgtaccactccagccgatgagtaactcaccttcgccaacggctgtcatccctttcaggtgaatgatatttccatacgctgttggatatccgttgttatacacctcgtataactcaagacctgctgccccctgcgtattgtctgtcagcgcggctacccgaccttttgaagccagattaactgatgatactgctgttccacctgacggtagcgccccgatctctgatgccgttggcttatttctggagttatagtcccttcgccagccaggtgaataatctgttccgtgattaatataggtaaactgggcgttggttgttccgccaccgctggatgtggtcggagtggtaatgcggatcgtcatcgctgactttatccccattacttcaatgacagctccggcgagatgaatattaccgcagccagtatcagtaatgattttattattgccataagaccaggaacccttgcacatccagtatggatggttaaatgctccctgagaatccagccactcgataaactgtgcagtcgtccagtttcctgttgttgtgcttactgacccaccgaaggcacggcaggcaccaatatttttcgtaaaggtgtctttgccagggatatccgcaccgttctgatctttctgcagacgtttctcagcattgtcattggctgcttttactgcctttggcgttgccgccagcgtttcagacgtgctgttggtcgcgctgcttagctggattatccctttctgtgctgtcgttgcatcctgtgcggtgtatttcccgttagccaggtcatacgcggccttaacggcttttggtgttgccgccagtgactcggaagtgctgttagtcgcactactgagctgtactatcccctttttcgtcgtgctcgcatcctcaagcgccacggcggatgcaatatcctctgcccgttttgccgctgtctcagcgcgcgttgctgcagattccgccgtacttttgctctgagctgctgccgtcgcactaccagcagcctctgtcgccttcgtggatgccgtcgtggcgctgcccttcgctgctgacgcctgtctggtcgcctcatcttttgaagcagacgccgatgatgccgatgacgccgccgaactggcggacgatgcggcagccgtttttgaggattctgcacgggtttccgacgctttcgcgttcgtttcggatgtcttcgctgcggaagctgacctcgctgctgccgtggcctgctcagtggcttcgccagccttcgttgtggctgttgaagcggatgatgcggcgctttctgccgattttccggcggcggtggcactggctgaggcctgcccggcacttgttgacgcggcgctggcagacgacgcagccgctgtttttgagcctgccgcagctgaggcactctgtcccgctgccgtttcagaagacctggcgttcgtctcggacgttttggccgccttcgcagaatttgcagccgccgtcgccgaggaagctgcgctactggcgcttgatgatgcgttcgtttctgatgattttgccgcctcttttgaagccgacgcatcccgggctgaggtggcagcttctgacgctttcgtggtcgcggtggatgcagaagtggctgctgattgttgtgacgctgccgcattcgtttctaacgttttcgccgcaccggcactggtagccgccgcgctttttgaggactctgcagcggcagcactttttgaggcttcagtggcctttgttgatgccgttcctgcgctggaagacgctgactgagccgacgaagcggcctgtccggctgacgtgctggctgcacgtgctgaatctgcagcatcagtcgcatgggttgccgcctcacgggctgatgtgctggcatcgctggctgatttcttcgcggctgccgtgttctgtgccaccgcggacgcgttacgcgccacctcttccaccatcagctcaaaacggcgcagtgcctccggacgggcatcatcctccgtcatggcaccgagaaaatcattcagcgtaccgggtcgggaatcttcatacacggtgatggtcccggcatgtgacggcgggaatccttccaccaacagaataacgctgtactgaccgtactcaacgtccatgctgtaacgcccggcttcatccggattttctgaggccagcgtgttcaccaccaccgtggtgctgttacgttttgctttcagctggattgtgcagttctgtaccggttttcctgtgccgtctttcagtacacctgaaatctttactgccatattcaccccacaaaaaagcccgcctgaaccggcgggctgtcataacactgtgttacctggctaatcagaatttataaccgacacccacgatgaaaccgtcagtgcgccagagacgtgttgctgtggcgaccgtcatcacttccggtcagcacatcgtgcgttttccccttattgtcagttacgcggatataatccccggaaaaagtcgacacacggctgtaagccacacccgccatcgcatacgcgctgaaccattcattcacgcgcacagacggccccgccatcacgctgaaccagcggttacgcacggaatcttcatgccagcgggtatcgctgtaacgggtcagctggcgattcttgtctcctgcatagctgaatgacgtcaccagccccagcgtatccgtaaactcataacggtatttcacgttaatcccgttcagatcatcactgccgggaacgttggtccgggcatgaagataccccgcgctcagcgtggactgatgttcagacgcccatgcaggcgcaccggatacggccaggcaaatggctgcggacaaaatggctgcacaaactttacgcataattacctctcgcttttctgcaataaaaaaggcgtcattcctgacgccatttattggggttataaatatttcaacgaatactgatgccggaagccgcttttttggtcacaatcaccgtacagtcggtgatattgcctgccccctgattgcctttctggaaaatcttaaactccagagtgacgctaccaccaccactaggcatatcaataactgcactgtaactaccgggaatggcacctttagtttctctggatgcgattaatacgccgtttttgcgaacttcaaaaccataacccgtgtatcgcgtgcctcctgggttatttccgctccccggatcgtcatacgctataccgttaaaaataatgggcggaataataatctggcggtcaaagttatgatcatcgcttatggtgactgtaaccgtcccgtttggtgtttccgtgttaccccacgtaccagcctgtttcggaaatgatttggatacagctttaacgaagtcacctctgacctgagtcgcctccagcatgcccttaatcgtacagttttcatttaccgtgacattgttgagcgtcccggcgttcgcattcacactgccactgatatccgcatttttagcggtcagctttccgtccggagtcagggaaaatgccgatggatttccaccgctggtaatggtgggggccgtcaggcgtttcaggaacacgtcgttcatgaatatctgatcgccctgaccaacaaacatcggttttgtgttgccattcgcaggattaaccatcgcaatcctgtccgccgccagcagcacctgactctgcatgccgtcaggggtgttctcaataccggcaccaatacccgcgatataaaggcgtccgtcctgcatctgctgcagcttcacagcccacatgctgttcaggttattatttgtatcaacctgaaccttctgtatctgctgaattgccgcactctggtcttccagtttcttattgacggtctgcgtgatttcattgctgacatccgtaatggacgtcctgatttcagccaggtcaggcgcaagctgaccgttatcaatctgcgtccacagctcctgagccagatgggttttccctatctcgcctttgaaaaaatccagataaccggatgcatcatcactcggctgaccaacagcctccacgaatgccgatttgccaacggtgttcacactgcggatataaaagtaataatcatggcccggtttgatattgatactggcggctatccagtacagcgccgtgccaagatagcgtgctgtggtttcaacctgcctgatatccgcaatccgcttttccgagaaccagaactcaaactgtaccgtcggatcataaaccgcaagatgcggcgtggcggttatctgaaaatagcccggcgtcagctcaatccgcgacagcgctgccggtgcggcaatccggaacgataccgacgccggatcgccctgctgcccccacgcatttactgcccggactgtcagcctgtagttccccagcgccagttgtgtgaagcggtaagtggtttccgtcgtccgggccgtgctgaccagccgctcactgccgtcatccgctgttacggtcagacggagcaggaagctcacgcccttcaccaccttcggcgtgtcccagcgcgccagcacctgatattccccgctgtctgcggtgacttcggcagtcaggtgctgcaccgctggcggcgtgacaccattcaccgtgccgctctggtcgccgtcaaagtgcgccccgttatccacgatggcttctttttccggcacatgctgcacggcggtgatggcatacgtgccgtcgtcgttctcacggatactcacgcagcggaacaatcgctggtgcagcgtcggcagcttcagcccccacacgctgtattcagcaacaccgtcaggaacacggctcacttttaccttcacgccgtcggtgacggactggacctccacgctgaccggattcccctgcccgtcaaccaggcttatcagcgtggtgccggaggatggcagcgtgatttcacggtcgagcgtcagcgtccgggtctggctgttcaccgccagcacgcgcccgccggtgcggataccggcatagtcatcatcgcagatttcaatgacatcgcccggtacatgacgaagcccttcagcacccacgctgaaatccacggtctgcgtctccagcagttccgttttaatcagccacagcccggcgcggtgtgcctgcccccggctggtacagccaaaggcatccatcttcgtgacgttacgaccgtaacggacaatggcctgcgtatcctccacaagctctgtcgccgtctcccagccgttatccgggtcaatccagttcacctcaacggcattatggcggtctttcagggcgctgaaactgtagcggaacggcgcgccatcatccggcatcaccacattactgcggttataggcccacaccttatccgactgtcggtcctgcacgaacgtcagcgtctgcccgttccataccggcatacagcgcatcgccgagcagaaatcactgagcacatcccacgccttgcgctgtgtggtcagccaggcattacaggtgatgcgcggctccgtgctgccaaagccgtccggcaccgactggtcacagtactggccgatgacatacagcgcccatttatccacatctgccgcaccaagacgtttccccatgccatagcgcggatgggtcagcatatcccacagacaccaggccatgttgttgctgtatgccggttttaacgttccgtcccagataccgctgtattgccgcgtctgcggattatagttcgacggcacctgcagaatgcgcccgcgaagatgataattacggctcacctgctggctgccgaactgctccgaatccacctgtacgccgaccagtgccgtgttcgggtagcactgtttcacatcgatgatttcggtgtatgacgaccagagcgttttgttctgcagctggtctgtggtgctgtccggcgtcattctgcgcatccggatattaaacgggcgcggcggcaggttatccaccaccaccgaggccagatactgcgaggtggttttgcccttaatggtgatgtctttttccgtcacccagccaccgttacgctgtatctgaaccagcaggcgaacttcagacggattcctgtctccctttgaggtggtttccaccagtgcctgtacaccgaaggtaaaacgcagtcggtcaatgtttgccgacgtgatggtccgggtgatcggcgtgtcatatttcacttccgtacccagcaccgtctcggagccggaggattcaaatccctccggcggtgactgctcctgctcacctgcccggaacaccaccgtgacgccggagatgttggtattcccctcactgtccagcaccggcgtactgttcagcagcacgctttttaatccatccaccggaccttcaaccggcccttcgctgatggcatcgatcacactcagcagctgcgtggacttcaggttgtccttcgcttcgcgcggggtatgccccttactgctgcctttacccattcgtcatgctccataaacgataaaaccgcccggaggcgatttcacataaaacattttgcatcagcgaccaatcaccacaacctgaccaccgtccccttcgtctgccgtgctgatctcctgagataccacacgtgaccccacgcgcatttcaccatacagaacaggcataacattgccctgggcaaccatgttatccagtgaggagaaatagatgttctgcttaccgttatccgttgtctgtgtgcggggagttctggctttcggtgccagcatctgagccacaccgccgagcaccatactggcaccgagagaaaacagaatgccggtcataccaccggcaccaatggcagccccccatgctgcaagggtggctccggcggtaaagaatgatccggcaatggcggctgctcccaggacaatctggaatacaccacctgacttggccccggcgactctgggaacaatatgaatcacagcgccgtcaggcagagcctcatgtaactgcgccgttaatccggacgtgctaacatcctgcccggcaatacgcacctgataccagccgtcgctcagcttctgacgaaacgcagggagctgtgtggccatcgcccggatggcttcggcacccgttttcacacgaaggtcgatgcggcggccaaatcgttgcaaatccccgtaaaggcagatgcgtgccatgcccggtgacgccagagggagtgtgtgcgtcgctgccatttgtcggtatacctctctcgtttgctcagttgttcaggaatatggtgcagcagctcgccgtcaccacagtaaatggcggcatgattcggcaccgatgaaccaaaacagcacagcagcacatcgcccggctgcgccgctgacaacggcacctgatacagccctgtggcctccagattatccagatagagattctgaccgtgacgccaccagtcatcctcacgatgaaaatccggcatctcaatccccgccagatggtaagcatcccggaacagcgtgtaacagtccgtcaccccgtgctcaaagcgccgcccggtaagatgtggcacacagcggaacttgtgaatcgccccccggcagaccagccaccacggcaaatcactctgcacctgcagccgccggtcggcctcactcagccagggcagaccaccggggtggctgtggaccagtgccacaatctcaccctgcatctctgcctgcagccagtcttccggcgacatacggaaatacgcctccggctcaccggagatattcacgcaggggaaatatctttccccctccggcgttcttaccacgaagccgcacgactccgctggagcacatcgccgggcgtgcgccagaatcgctgattctgtctctgtcatgggatttactgcgaaagtttgttaatggaaaggaagccgccaaagttgccgacgttattgcgaaacttacagccactcaggcatttgctgcatttatccttcgtgatgtcggacgttggctggtcatattcatccgcgaccgccggaccgtgataaccgcactcatcgccgcgataggtccaggtgcaggtgttggccagcatgatacgtcccggaaaaacagcgccatctgtttccgtcggcgtggacagtacaaaagaggcactcaccgcgctcagttcgctgcactgctcaatgcgccagcggctgatcacctcctgctccggatcggcgtcactgtttccgttgacgaagttcaccgcatccagaaaacgggcgtaaaccttacgccggaccaccgttccgccgaccagactctgtagatcttccgccatcccggtgaccataccgtacaggttagaaaccatcagcgtggggcgcgtactggtgcctttgccattcagttcaaaaccactcccctgaatgggatacggctgatactgtcgcccctgccaggtgaccggctcacctttttcgttctgctcattacagaaaaaataacgttctccaccgacctctgtcagatcgatttcccagagcaccacgctggccgactgctccgcacgggtgcattcattcagtgtttcctgccggatatcctgcatcagttcaccacctgttcaaactctgcgctgaactcaacacgcagcatactgacccgcgacgaccattttgcgcaggtcacctttatctgccgccactcataaggcggcgtccacagaaaggctttccagcccccgtgctcttccagaaacgactccagtaccatggcctcctcacgggggacagaaagcgtcacgctgtacgttttcaggttggcattcagcccggcaggcgctcgctgggaatagccatcaccaaagcgcacctttcttacagaaggggccgaagccacatccataccgggtttcactttccagcggaaggttttcatcgtccacctccggagaacaggccaccatcacgcatctgtgtctgaatttcatcacgggcacccttgcgggccatgtcatacacggccttcatcatctgtggacctggcagaccattcgtaccgtcgttctgaatcaccacgtgattgttctgattaaaattaatgccttcagcccgccgcatctgcgccggacttccggcaccgcccacataaccaccttccgcatagccgcgcatcagccggtagagattccccacgccaatccggctggttgcctccttcgtgaagacaaattcaccacggtgaacaatccccgctggctcatatttgccgccggttcccgtaaatcccccggttgcaaaatggaatttcgccgcagcggcctgaatggctgtaccacctgacgcggatgcgccgccaccaacagccccgccaatggcgctgccgatactcccgacaatccccaccattgcctgcttaagcagaatttctgtcatcatggacagcacggagcgggtgaagctgcgccagttctgttcactgccggtcagcatcgccgccatattctgtgcaataccatcaaaggtctgcgtggctgcacttttaacctgtgacatactgtccgtggcgctctcttcccactcactccagccggacttcaggcctgccatccagctcccgcgaagctggtcttcagccgcccaggtctttttctgctctgacatgacgttattcagcgccagaggattatcgccatactgttccttcaggcgctgttccgtggcttcccgcgctgcctgccggtcagtcagcccccggtttttcgcatcaatggctgcccgttttgcccgttgctgctgtgcgaatttatccgcctgctgcgccagcgcattcaggtgctcctgatacgtaaccttgtcaccaagtgcagccagctggcgtttgtactccagcgtctcgtctttatgcgccagcagggatttctcctgtgcggacagctggcgacgttgtgccgcctcctccagtaccgcgaactgactttctgccttccacaaatcccggcgctgctggctgattttctcattcgctccggcatgcttctccagcgtccggagttctgcctgaagcgtcagcagggccgcatgagcactgtcttcctgacgatcgcccgcatacaccttcacgccggactgtttcggctttttcagcgtcgcttcataatcctttttcgccgccgccatcagcgtgttgtaatctgcctgcaggatttttccgtctttcagtgccttgttcagttcttcctgacgggcggtatatttctccagcggcgtctgcagccgttcgtaagccttctgcgcctcttcggtatatttcagccgtgacgcttcggtatcgctctgctgctgcgcatttttgtcctgttgacgctgttgatctaccctcttttgggctgcatcccgctccaggcgttttttttcacgatcatcccagtaacgcgcccgtgcttcatcgttaacgaaataatcatccttgcgcagattccagatgtcgtctgctttcttaaacgcagcctctgccttaatcagcatctcctgcgcggtatcaggacgaccaatatccagcaccgcatcccacatggatttgaatgcacgtgcagtcctgtctgcccaggtctccagcgtgcccatgttctctttcaggcggcgggtctggtcatcaaaccctttcgttgcggcctcgttcgccgcctgcaatgccccggcttcatcgccggaacgctgcaactgagcaacatacgcaatctgctccgccgtcacgttatggaactggcgtgccatcgccgtcagccccgacgtcgggtctgtggtcagcttcccgaaggcttcagcgaccttgtccacctccacgccggatgcagaggagaaacgcgccacactctggctgatggacgcaatctgagcctcaccgcttacccccgccttaaccagtgcgctgagtgactcgctggtctggttaaacgtcagccctgccgcctgcccggctctggacaggaccagcatacgatctgccgtcagtcccgcctgattaccggaaaggaccagcgttttgttgaaatcggacagggttgagttgccctgataccaggcatacgccagcgcaccggtcgccaccgccagcgaggtggcccccaccatcggcagggtgatcgcgccggcaagccccctgaacatggggatcatcccgccgaaggagtccttaacctgaccaccctgttgcagcaggatcagccagggattctgcccccctgcaagctgcgtggccacgtcggtgaactgtgcaggcagcatacgcatggcggctttatactgcccgacggaaatccccgctttctgtgcagccagcgcctgtcggctcagcgactgttcaacgactgccgctgtttttttcgcatcactttccgtaccggaaaaatgacgcctgactctggccatctgctcgtcaaatctggccgcatccagactcaaatcaacgaccagatcgcctaccggttcagccataccggactcctcctgcgatcccttctgatactgtcatcagcattacgtcatcctccgtcatgtccgccacatccggggaagcggggataacttcattcccgtccgggccaaagcggacacctccggcaagccctgccgctttctgcatcagcacatcatcttcaggctcttcgtcagcctcgcgccggttcagcagactgaaatccagcggatgcatctccggatcgctgaaaaacaggctgagcacggtgtacgtcagcccggaaaagtgcatatccagcagaacatcatgaaaataatgggtactgtaaaagcggtgccagtcggcatactccgtggatgacatcccggcaagcatggcgcgccagtcgggtcgccccatctcacgcgccagtttcagggcaaaactcagctcaccgtcgaacactttcccgcagaaacaggctctgcaggcccggcgtcctctgcctgttcaggagcatcattcaccacaaactcatacataccggacagccggtacaccacgttttcagcatgagaaattgcctctgtgggccaggtggtaagcacttcctgctcaatctgtttaacggcttcattcatggacggcatctgcgtcttcttcggatggttatgccacagggacatcgcaaccacaaaagcgccggttctgatggcgtcttccacagtaaacttccggttgctgtctgactccgcctgttctgcctgccgtttcatcaggtcgagatgctcaatacgctgcagggctgacagttcagaaagcgtgacggtcacaccgttatgttcaaatgattcggttttcaggaacatcgctgactctccggattaactggcggtgacgttgatttctgcaaccgcagcaaactcaccattaccagatacgaccggaatgttgaccttgcctgcagcaacacctttcacggtgatggtcataccactgaccgacacggtggcttttgttttatccgcagacaccgcacggaagctcttgtcggttgcgccatccggctggaatgccacggtcagcgtggtgctctgccctttcactacggaagcactggcgggtgtcaccgtcatgccggtcgtcgccgtcaccgtgctgcgatcttctgccatcgacggacgtcccacattggtgaccttcaccgtgcgggtaatcacctccttcgccgtcaccgccttaccgatactgctgacccagccacggaacacatcgaccgtgccgttcgggaagcggattttataggcacgggtatcaccttcattaaaccacgccagcagcgcctgctgcccctgctctccgggcatccacgccagcgtgaagctggtatctccggcagatttctgcccctgcccggtcgcagtccagtctgcatcttcatcatcgagatagctgtcgtcataggactcagcggtcagttcgccgggcgtcaggtctttaacttttgccagacgcgaccagtcaacgtctgaaagcgggttcgcataagggtcaccgctccccttataaacccacagggtggtcccggcacctttcaccggcattgtaggatttggtacaggcatagcgtcctcacatttcatagataatgacataagtcagatcggctgaactccacaggcccgcatcatcgtcgcgccggtagtcatagccgctggccaccatactggtgatcaaatctgacagtgccgggatatcgctcatcaccggataaatccgggactccatccacgaatccagctctgaatccggcacctgagcaggcaggaaaacttcaatatgcagctccgcctgccaggtatcgctgtccagctcttcgcccgtgtattcagcgccggtgagataaacggcaattgccggaaaatcttcctcatcaaaaacagcggggcgaccatcaaaaagcgtcgccccggtgtcatgcttctccagtgcatccagtacggctgcacggagttcagtatgtttcatcgctttattaccattctcagttgatgctgcagcgcatagcccagctctttcggaagacgttcacgccgtatccgttcaatattctgtttaaacgccgtggtcagcggcaccgccatcgggattttcaccacatcaatggggtaacggtttttcccggccacacgctgcataacatgccaccggccgtttttcagttgctgaataaacgcgccgggaatacgacggttacccaccacaagcacgctgccgccacctttcagggatgaacgctgcccctttttatgacgcctgcggcgggacaggacaacccgcgcattacccagcttgattacgggcaaatccccccggttaactttgattctggcctgcggatttttgaccgtggcccttttcagcctggccctttcctttaccagtttccggcgtacctttgtctcacgggcaacctgtgacgcagactgcgatatcgcggatgaagcaacgcggttaatggccattgcggcggcaccgggcaccgccgttttgctgatacggctgaggttttcaacggcctgctcaagaccttttatggccatacatccccctttcagcggcgacggttaacggcaggcggtacgccccgtccaagccagagatgacaacttccgccatcatccggcgaaacccgatctacccagaaattttcctcaccgatggtcagcgtgtctccacgccgcagctgccgcacctcatcagtccggacaaacagggacgggctggagccttcaacgcgcacgccctgtccggcatagctgatattttcagggtcatcaaaaacaccacgtatcaccgcacctgactgctcaccggatgtcatggtggctgacgttcccatgtacccgcgtatcgtttcatcggcgcgggcaatggcagcatcgaacaggttatcgaaatcagccacagcgcctcccgttattgcattctggccaggccgcgctctgtcatttcggctgccacaccggcagagacacgaaacgccgttcccggcagcacaaatgccacaggtttatcccgcgtggcgtgaagtgcatcagtatgcagcgtcaccagtgccacgaccgtgaccagttcagccgtatcctgaatcacggtatccggctgcgctgataccacctcattttcatgcccggtcagcacattttcccggctgagaggggtgtcctgaccggcagtttcatccgtgtcatcaagctcttcttccagctctgccacacgaagcgccagttcttctttcgttcccgtcaaactgacatcgcggttcaattgctcacccagctcctgaagacgggcaatcagttcatctttcgtcatgaactcctccacagagagaaaatggccccgaagggccatgattacgccagttgaacggacacgaactcatcaggatcagccagcagcatcagcggtgctgactgaatcatggtgaactcacgcgccggatcgccggtggtcacccagtttttcgggtaacgggcagaggcgttaatgccttcgcgctgtgcgtccgcatcctgaatgcagccataggtgcgcagaccgcgagcctgagtgttccccagcaccatcgtgttgtccggcaggaagttctttttgacgccgttttccacgtactgtccggaatacacgacgatggccacatcgccatacattcccttataggacaccgctttgcccaggtcttttaccgctgtctccagctcggaatgagagccgcgacgggtatccagcttctccttgacggctttgaaggaacggaacagcgcccagcctttcgggtcaaacacgatgatattcaccacaccgctggcgttcagcgcgtaggcttcgatatcgtcggtcgggtcatacgtggacttgtcacgcttgctccactccgtgacgccggactgtgtgatgttgttcgccgcactgcggcccatatccacctcaaccggatcgaaggcttcaccggtcatggtgtatttgcccttgagcacggcagaaactgcctgcatctcttcgacctgagcaatggccagctcttcgtcacgcatgttctgcatgatgatgcgacggcggcggtaagccgggtccgccagattctgcggatcttcatccggcaggcgacgcagggtcatctgcggattcacctcatgcttgggtttgacatatcccggcgtaaattcagaggtggagccgccacgggaacggataacctcaccggaaacaatcggcgaaacgtacagcgccatgtttaccagtcccggaatttgtgagagatagactttctccgtagtgaagggatagctctcacggaaaaagagacgcagaaacagcggatcaaacttaaatttctgctcatttgccgccagcagctgggcggttgtgtacatcgacataaaaaaatcccgtaaaaaaagccgcacaggcggcctttagtgatgaagggtaaagttaaacgatgctgattgccgttccggcaaacacggtccgttttttcgtctcgtcgctggcagcctccggccagagcacatcctcataacggaacgtgccggacttgtagaacgtcagtgtggtgctggtctggtcagcagcaaccgcaagaatgccaacggcagcaccgtcggtggtgccatcccacgcaaccagcttacgggtggaggtgtccagcatcagcggggtcattgcaggcgctttcgcactcaatccgccgggcgcggttgcggtatgagccgggtcactattgcccagcggctggtaatgggtaaaggtttctttgctcgtcataaacatcccttacactggtgtgttcagcaaatcgttaacggcatcagatgccgggttacctgcagccagcggtgccggtgccccctgcatcagacgatccagcgcagtgtcactgcgcgtctgtgcactctgtggtgctgcggccagaatacggcgggccgtttccacggtcataccgggggtttcggccagcacgcgtgcctgttcttcgcgtccgtgagcctcctcacagttgaggatccccataatgcgactgttttctgccgcaaccgctgcggtgatctgcgcgttcacgtccggctgcgccgcgctggcgttctcgccctccgtcgcttgcaccacgccagtaacgtcagcctgcgaagcagtggctgaaacagttgttgattgagtctctttggtcattcgccctcctgagagacgggatttacgtgcatccagtgcatcacgcatgacggtgatcgcatcggtactgttaacaagttcatcagccagtccggcatcaatggcctcctgaccgctgtacactgcagcctcggtatccagcacagcctgcacggacaggccggtatatgccgacaccttctgtgcaaacatccggcgggttgcatccatccgggactgcaatgtttcccggacatcatccggtagatggctgtaggggttgccatccaccttatggctgccgctgtaaatcagcgtgatttccacgccctgtttctccagtgcagcgccgtaattactgtgagccatcatgacgccgatggagcctgtccgggcggtctgcgtgaccagacgccgggaggcggcactggcaagcagctgacctgcgctgcagttcatgtcattggccagcgcccataccggctttatgtcacgcacacgggcgatgatgtcagcgcagtcaaatgctcccgccaccattccgcccggtgtgtccatatcgagcagaatgccgtccaccatcgggtcgctggcagcctgttgcagacgggcgataatgccgttgtaaccggtcatccccgagtacggctgcagcgcccgcgtccggctgaccagcgtgccggacaccggcagcacggcgatgccgttcattacctgataactgcgggcctgtcgtggtccgtcatcatcaccggataacgccagcgccgcgggtgcctctccggcagtcaggctgtcgccggatactgcatccgtcaggcagctgatcccaagctggcctgcaagcgcacaaaagaaaacccgcgcataggcgggttcaagcatcagcggctcattaaaagccatgctggcaatatgcgggagattacgcagctctgctgtcactcttctcctcctctgttgattgtcgcagcccggattcaaatgccgcagccgcccaggcgggcggtttaagaccagctgcgcggcgctccatcgtttcacggacctgctgggcaaaaatttcctgatagtcgtcaccgcgtttcgcgcactctttctcgtaggtgctcagtccggcttctatcagcatcaccgcttcctgaacttctttcagaccatcgatggccatacgaccggagcctatccagtcgcagttcccccaggcactgcgggcttcctgaaagctgaagcgcgcttttgaaggtaacgtcaccacgcggcgaacgatggcctcttccagccagcacagaaacatctggctcgcctgacgggatgcgacgaattttcgccgccccataaagtacgcccacgactcgttcgcactggcccgtgccgtggagtagctcatctgggcgtaattccgggaaagttgctcatacgagacacccagcccggcagcgatataccgcaacagtgactgctcaaacacggagtagccgttatccgtgtcctgagccgtctgcaggttcagtgagtcccccggcatcaggtgcggcacttttgcgcctcccagacggaccggtgctgcggcgtaatacgcggcaatttcaccaatccagcccgtcagcctttcccgctgctccttactgttcgcgcccagaataaaatccatcgctgactgcgtatccagctcactttcaatggtggcggcatacatcgccttcacaatggcgctctgcagctgcgtgttctgcagcgtgtcgagcatcttcatctgctccattacgctgtaaaacacatttgcaccgcgggtctgcccgtcctccacgggttcaaaaacgtgaatgaacgaggcgcgcccgccgggtaactcacggggtatccatgtccatttctgcggcatccagccaggatagccgtcctcgctgacgtaatatcccagcgccgcaccgctgtcattaatctgcacaccggcacggcagttccggctgtcgccggtattgttcgggttgctgatgcgcttcgggctgaccatccggaactgtgtccggaaaagccgcgacgaactggtatcccaggtggcctgaacgaacagttcaccgttaaaggcgtgcatggccacaccttcccgaatcatcatggtaaacgtgcgttttcgctcaacgtcaatgcagcagcagtcatcctcggcaaactctttccatgccgcttcaacctcgcgggaaaaggcacgggcgtcttcctccccgatgcccagatagcgccagcttgggcgatgactgagccggaaaaaagacccgacgatatgatcctgatgcagctggatggcgttggcagcatagccgttattgcgtaccagatcgtctgcgcgggcattgccacgggtaaagttgggcagcagggctgcatccacactttcacccggtgggttccacgcccgcaactgcccaccaaatccgctgccaccgccgtgataaccggcatattcacgcagcgatgtcatgccgtccggtcccagaagggtgggaatggtgggcgttttcatacataaaatcctgcaggtcccctgcgtcgctgtgtcatgccggtctgcacctccagctccgcaatgtattttttcaggtcagacacggaagtggccgtaaactccactcgccgtccgtctttctgtaccgttgccacccgtttacctgtcatcaggtcatgcagtgccgcacgggcagcggcaagttcttcctgtcgcgtcattcatcctctccggataaggcacgggcgtaatctgccagtgttttcttgttggttgctgcaccatcctcttcctgcaggctcgccagcagtgcactgagatccagctgccagcgggaaatactgatgcgcagcgccgccagcgcataaacgaagcagtcgagcgcctcattgcgtcgctttttgctgtcccacagtatttttttcctgccatccacccatttttcgacctgctcttcagcagtcagctgctgcgcttcggtcagatcaaaaatatccgggttattcgggaagtgaacggcaccgggaagcggttcatccccttccggcgtcagtgtgaagcggttataaatctgctctttcgcggtatccgtaccgatttcggtaaggtaaaccccgtttttgtttcgcttacgaggcatgctggccaccggcttaccgtagacggatgcccctttaatggggatcacccggaacagcccatgctttttcgagcgttcatacacaatggtcgggtcaatcccgccaatatcccagcagatacgggatatcgacatttctgcaccattccggcgggtataggttttattgatggcctcatccacacgcagcagcgtctgttcatcgtcgtggcggcccataataatctgccgatcaatcagccagctttcctcacccggcccccatccccatacgcgcatttcgtagcgatccagctgggagtcgataccggcggtcaggtaagccacacggtcaggaacgggcgctgaataatgctctttccgctctgccatcacttcagcatccggacgttcgccaattttcgcctcccacgtctcaccgagcgtggtgtttacgaaggttttacgttttcccgtatcccctttcgttttcatccagtctttgacaatctgcacccaggtggtgaacgggctgtacgctgtccagatgtgaaaggtcacactgtcaggtggctcaatctcttcaccggatgacgaaaaccagagaatgccatcacgggtccagatcccggtcttttcgcagatataacgggcatcagtaaagtccagctcctgctggcggatgacgcaggcattatgctcgcagagataaaacacgctggaggggtcatccggcgtccatttgaggccaaacggcgtctctttgtcgccaaatttaagatactgctcctccccgcagtgcgggcaggcaacatgaaaacgcataaaatgcggggattcactggctgcacgctcaatctggcaggtgcctctcactttgggcgtggagccacggatggactttggccagaccgagccttcaatacgtttgtcgccaaggaacgtcggagagccttcctgttcaatatcctcatcaaaggcagcaagttcatcataacccgccacatccaccgacttttcacggtagttttttgccgctttaccgcccaggcaccagaagccacgaccattggaaaaacgcttcatagtgagcgtgttatcccggtgctttttgccataccacggagccagcgccagcagcgacggaatatcgcggatggtcggctcaacgtgggttttcataaagttctcggcatcaccatccgtcggcaaccagataagtgtgttgcgctgcttatgctctataaagtaggcataaacacccagcagcattttggaataaccgacacgggcagacttcaccacattcacctcacggatgtagtcgctgcccatcgcattcatgatggcccgctgaaagggcagtgtttcccagcgcccttcctggtatgcggattctttcgggagatagtaattagcatccgcccattcaacggcggtctgtggctccggcctgaacagtgagcgaagcccggcgcggacaaaatgccgcagcctgttaacctgactgttcgatatattcactcagcaaccccggtatcagttcatccagcgcggctgctttgttcatggctttgatgatatcccgtttcaggaaatcaacatgtcggttttccagttccggaaaacgccgctgcaccgacagggggatcccgtcgagaatactggcaatttcacctgcgatccgcgacagcacgaaagtacagaatgcggtttccaccacttcagcggagtctctggcatttttcagctcctgtgcgtcggcctgcgcacgcgtaagtcgatggcgttcgtactcaatagtccctggctggagatctgtctcgctggcctgccgcagttcttcaacttcccggcgcagcttttcgttctcaatttcagcatccctttcggcataccatcttataacggcggcagagtcataaagcacctcattacccttgccaccgcctcgcagaacgggcattccctgttcctgccagttctgaatggtacggatactcgcaccgaaaatgtcagccagctgctttttgttgacttccattgttcattccacggacaaaaacagagaaaggaaacgacagaggccaaaaagcccgttttcagcacctgtcgtttcctttcttttcagggggtgttttaaataaaaacattaggttacggcgaagaagaacggaaacgccttaaaccggaaaattgtcataaatagcgaaaacccgcgcgccttccgccccgtaacctgtcggatcgccggaaaggacccgcaaaatgataataattatcatctacatgtcacaacgtgcatctacgccatcaaaccacgtcaaataatcaattatgacgcaggtatcgtattaattgatctgcatcaacttaacgtaaaaacaacttcagacaatacaaatcagcgacactgaatacagggcaacctcatgtcaacgaagaacagaacccgcagaacaacaacccgcaacatccgctttcctaaccaaatgattgaacaaattaacatcgctcttgttcaaaaagggtccgggaatttctcagcctgggtcattgaagcctgccgccggagactgtgctcagaaaaaagagtttcgcctgaagcaaacaaagaaaagagtgacattactgaattgctcagaaaacaggttagaccagattgaagcaatttagataatcgtgcagactacgccccctcatatcacatggaaggtactacaatggctcaggttgccatttttaaacaaatattcgataaagtgcgaaataatttaaactatcactggttttattctgaactaaaacgtcacaatgtctcacattacatttactatttagccacagagaatattcatcttgttcttgaaaacgataatacggttttaataaaaggacagggtaaggttgtaaatgtaagattttcaaaaaataaatgccttatagaagccaccttaaaaggattcaaatcaggagagttatcattttacgaatacaggaaaaatcttgctacagcaggggttttcagatggattacaaatatccacgaaaacaaaaggtattactatacctttgataattcattactctttactgagaacatacagaacactacacaaatatttccgcactaaatcataacgtccggtttcttccgtgccagaaccggactcgctggcatgatgaaatatgtgtacccggtaaccccggtgtgcatcgtttttgattattcccgcacactcgcgcagaaggagttccccgtcgggctacggtctctgttaatacgggaatacggcgacgattggatttgcccctatatttccagacatctgttatcacttaacccattacaagcccgctgccgcagatattcccgtggcgagcgataacccagcgcactatgcggatgccattcgttataatgctcgaacgcctctgcaaggttctttgctgccgttaacccgtctggtttgggcatgatactgatgtagtcacgctttatcgttttcacgaagctctctgctattccgttactctccggactccgcaccgccgtgttcttcggttcaagtcccaacatccgggcgaactggcgtgtttcattagcccggtagcatgaaccattatccgtcagccactccactggagacgacggaagatcgttgccgaagcggcgttccaccgctcccagcatgacgtcctgtactgtttcactgttgaagccgccggtagtcaccgcccagtgcagtgcctcacgatcacagcagtccagcgcgaacgtgacacgcagtctctctccgttatcacagcagaactcgaacccgtcagagcaccatcgctgattgctttctttcacggccactctgcctgtatgtgcccgtttcgatggcggtacagcaggttttcgctcaagcaacagcgcattctggcgcatgatccggtaaacacgtttggcattgatcgcaggcataccatcaagttctgcctgtctgcgaagcagcgcccatacccgacgataaccatacgtgggcagctctccgataacatggtgtatacggagaagcacatccgtatcatcagtgtgacgactgcggcggccatccatccagtcatcggttcgtctgagaatgacgtgcaactgcgcacgcgacacccggagacaacggctgactaagcttactccccatccccgggcaataagggcgcgtgcgctatccacttttttgcccgtccatattcaacggcttctttgaggagttcattttccatcgttttcttgccgagcaggcgctggagttctttaatctgcttcatggcggcagcaagttcagaggcaggaacaacctgttctccggcggcgacagcagtaagacttccttcctggtattgcttacgccagagaaataactggctggctgctacaccatgttgccgggcaacgagggagaccgtcatccccggttcaaagctctgctgaacaattgcgatcttttcctgtgtggtacgccgtctgcgtttctccggccctaagacatcaatcatctgtactccaatgactagtctaaaaactagtattaagactatcacttatttaagtgatactggttgtctggagattcagggggccagtctaacgatacagcgcatgatgtgtcaggcttgaatacctttatcctttaaaagggatatcagttaagttatcccgtgtagggtataagccattatcaaagccactctgtagggaatggcttttgtgatggcatcacttactctttacgctgctatcccactcatcccggaattttgatgggttattgaaaccttctgctgacataacaactccttcaatgtttggctgaaattgggatgtctttccatcagtccgccaccacaaagaatcttttttgccataaggcaggaggttcatctttcagtggctgccggtgttatttccccacttactggcttgggttgtttcgtggtactgccgttaactggtggcccagaataaattccggtttcattatcaagcccacccgtaaatgggctttgtaatggctacttcgcttttgcttccgctcgcttacgccggcgctcttctttcctctcggcttttgccatgtccatgaatgcctgcatgatcgagttccgcatcatgtagctaacaaagtgatgattgacacagccgttgaggcgcagctgctcgccaaactcatccaccgaggccaatgcttccatcatgcccttctcgcctttcatgaactctgagaagtcgcgccccgctctggaggcgcattcaataacatgatcactcatcccggaagcccggggatcgtaatctgcagctggttagccagggagttaatctcagcgaccaacactggcttcgtatagcgccatgctgccagcccttgtccgcagaagctcgccatgtctttcttctggtcaaattcatgacatttcatgttgagctgcgcacttaagctgttgcgatgctgaagttctccggtgaagtagtcatcgaggactttataggccgcgtacttgaacccggggtttaaccaagccgcataatcgtaagcaacaaacttcccgccatatgttccaccgtgtacaccgcgctcagtaaaaaccacagattcgtggtttttctccagctcggctaagaactctttggtctgcttgtttcgcaggtagtggtaaggcgattcagattcacttttaccactggctttccacatatcagtgaggcagatcatgccatcttcaccgatacgaattggttgattgaagagggttaatgatttcatagcgtgtacctactctttgaaatgaacctttgccgcacaggaaaccagcccaccgaggctcgccagcactaactggtatcctcaaaggcccattccaaaggggcaggttcggtgtaaaaaacatgcgttgcggtacgcatttattgcaaaaagccccgcatcgcgaggctcattaaatggactttgtgatttgcaaaaaaattatttcaggcattgcgtcctgatgtattcctgcaggtagttaacctgcgcggttatcttgtcgattccacttcggagacggtaataattgagttcagcatctgctgtaagtcctgggctttctccatcgcccatgccgctggctccggtcgttgactttgcacaggtggcggcgacttgcaggcgcttacgcccagcagaaacatcagcacggagactttcgatagtcgcgttagcatcagcaagctcctttatgtatcttgcgtcgagttctgctacatcacgttgacgcttccgcatgtcagcgatggtggcgttcgccttctccagttcactggccttgttatcgcgctgctctttgtaggcgattgcgttatcacggtaatgattaacagccaatgacaggcagacgatgatgcagataaccagagcggagataatcgcggttactctgctcattgtttcccccacaaacagacttcacgctcaatctcacggcgagtcatcagtcctttccattgattaccgccagcgtatgtccagcgccgtagctgatcacatgcgcctttaatatcaccctggtttattttgcgaagaagcgtcgatgttctgaaattgccagcacccacgttgtagacgaacgagtaaagagcgcagcgcgttgtttccggtatatcgactttgatgtacgggttaatttgtctggcgacagtggcaaggtctttattcaggagggctttgcactctgcttcggtatacgttttaccgggaatgatgtcttttcctgtatgcccgtaacatacagtccatacaccaactatgtctttgtaaggattatgtctcacaccttccagaccatcgttaccacctgggccagtgattaacacagatgctatagcaatagccccgccaccaatagcagcagcaacagcttttcgtaatgatggaggcattatccacctctcgcagccttgcgcttatcttctttaatcttgaaataaaggtttgtcaggtacgtcagcaggccaaataccaggctacccagcactccaattgccgcccactgtgagggcgtgactttatctagcagctgtaaaaaccagtacccggcactacctgctgaggtgccataggcgacacccgttgttaacttatccatggatttcataaccccacctcgcagacaaagcgggtgtaaattgagggaatactacgaaacgtaacagactcggagtcagtgaataactcaggtattgggttatcagctaatatcgagactcaaaaaatggaaaaacccgctcgacggcgggtttaagctgtgtgacgaagtaaccactcttaacagcataaccaattttggtgatgctgccaacttactgatttagtgtatgatggtgtttttgaggtgctccagtggcttctgtttctatcagctgtccctcctgttcagctactgacggggtggtgcgtaacggcaaaagcactgccggacatcagcgctatctctgctctcactgccgtaaaacatggcaactgcagttcacttacaccgcttctcaacccggtacgcaccagaaaatcattgatatggccatgaatggcgttggatgccgggcaactgcacgcattatgggcgttggcctcaacacgattttacgtcacttaaaaaactcaggccgcagtcggtaacctcgcgcatacagccgggcagtgacgtcatcgtctgcgcggaaatggacgaacagtggggctatgtcggggctaaatcgcgccagcgctggctgttttacgcgtatgacagtctccggaagacggttgttgcgcacgtattcggtgaacgcactatggcgacgctggggcgtcttatgagcctgctgtcaccctttgacgtggtgatatggatgacggatggctggccgctgtatgaatcccgcctgaagggaaagctgcacgtaatcagcaagcgatatacgcagcgaattgagcggcataacctgaatctgaggcagcacctggcacggctgggacggaagtcgctgtcgttctcaaaatcggtggagctgcatgacaaagtcatcgggcattatctgaacataaaacactatcaataagttggagtcattaccccaattttttacgtacgtaaaccactaaatgatatttgcgagaatgctaccgagtattgaaaacaccactacaaatacataagcaaatcccaacaaataaccaacaaataatttccagtgttatttttagccggtttaaattgaaccttcaaattatagagcacttataaataacagccgttaatataaattggctaatagatttatttttattcagccaagagccatgaataggattcgatagaaaaaagttcagataaaaatagagatctacttcacaaatcaaacgagaaaccaaaacttacatcttgaaataatcacattgattagatgaatatttatcgcgcagtgacatcattttttaataatagttcaaaaaaagggctcacgatgaaaaaattaacagtggcaatttctgctgtagctgcatcagtactgatggcgatgtctgctcaggcagctgaaatttataataaagacagtaacaagctggatctgtacgggaaagttaatgctaagcactacttctcctctaatgatgcagatgatggtgatactacttatgcccgtcttggcttcaaaggtgaaacccaaatcaacgatcaactgactggtttcggtcagtgggaatatgaattcaaaggcaaccgcgctgaatctcaaggttcctccaaagataaaacccgtcttgccttcgctggcctgaaattcggtgactacggctccatcgattacggccgtaactacggtgtagcatacgacatcggtgcgtggactgacgtcctgccagaattcggtggtgacacttggactcaaacagatgtgttcatgactggtcgcaccactggtgttgcaacttatcgtaacaacgacttctttggtctggttgatggtctgaactttgctgctcagtatcagggtaaaaatgaccgcactgacgtaactgaagctaatggtgatggtttcggtttctccactacttatgagtatgaaggattcggtgtaggtgcaacctatgctaaatctgaccgcactaataatcaggttatctacggtaacaacagcctgaatgcatctggtcaaaatgctgaagtatgggcagctggtctgaaatatgatgcgaacaacatctatctggctaccacctattctgaaacccagaacatgactgtttttggtaataaccatattgccaacaaagcacaaaacttcgaagtagttgcacaatatcagttcgacttcggtctgcgtccgtccgttgcttacctgcaatctaaaggaaaagacttgggtgcgtggggtgatcaggacctggttgaatatattgatgtaggtgcaacctattacttcaacaaaaatatgtccacttttgttgattacaaaatcaacctgattgataagagcgatttcacgaaagcatctggcgttgctaccgatgatatcgttgctgtaggtatggtttaccagttctaatttgattactaaaagatatgttgcgggaggctttgcctccccaacatataagtggctccctcaagccacttcctttaggagcacaaccttgcttctaactatataaaccttctgttatatattaccctttatttttgggggcgttgcaacgccccatttttaataatttttagtaaacaattggcatattaattagagttattaacaacgatatccatctctaaccggatatctaatgccattaacatcccttcaattatgccctcagccttctgtaaccttttcccgatataaccatcagagcagcaatgcttacctgccagtgacatgaatgtcataccgactacataataatctactaataaatcgtgcaaatcgctgttgttctttttcagacgggccatgcacccgcaaataatcatcgcgtcatcgtcacaacattgcgggcgagattttacttttgaagtaattaatcccttaaaaccggcggcaatggacgaccaggtcacatcttcatgattattagccgcccacgctccccaacgctcaagaaccatctgaatatcacgcatcaacttactccacaaaaatcagaccagaacgccaattacaagcaaaaatcaacaaaacagtattagttgattgttatctctgacttcatactcctgctcctgtcagggttttggcgtaattcttcagtattcggtaatcggtcaaaacagaaccggggaaacgatataagcgcagatgcccccagcggtggcgaagaagttctgccatataaaactcaaacatcattcattccccatttcggtgatggtcagttccagcctcccacctttggtaacaggcatcttcacaacgcggtaatcaacgacctgagcatcatccagccagaaacctgctttggtgagtgcgtcaaaagcggctttttgcagattatccaggtcacggcgacggcgatccggcatgtggcactcaatacggattttcactggcatagccaggccgatatccagcattgcgtttttaatgattcgggtgacgttatcgcggtatgcctgcccttctgcgctgatgtgtgtgcgcccgcgattatggcggtaatagcggttattgctcggaggccagggtaatgtgatgctgtaggtattcacgccttaataaccccctctttcagccagataacctgcgttctcgccataccttccagcgcgcattcttttgcatactcagcatcgacaaaatatgtgcggcggtcgatttcgtcgtgacaggcagaacatgcaatggtggcaatcaggtctggcggtttgataccggtaccgcacaatccagccagccggatatgtgccagtactgacgtttcaggattgccattacatacgccagggattcttacctggcattcccgaccacgcgctgcttttctcaaatcagccatgattcctccttgctgccagtcgcaaccattttttatcaaccaggctagcggtatatccgagcagtgttggtatttcggatggcttcagctcaggcttacgcttacgacgatttgatactctgtagatgtgcccgttcatgacacgaataagcggtgtagccattacgcctcctgcttatcgcgcagctgctggtattcacagctctgcggaattgtcaggtggcagccgatattcatcgcccaggcttcgactttgcacaggaagatgtacatctcgccggtttccagctctgacgtatggcggagggattggacggtggtgacctcgccggacacgacatctacacggtctttgctttcgtagccgagataggtgtgcttcatcgcgtctttgacccactcaggcgtagcgaaggtcttgccgcgggcgatgagatattcgctgatctccgtgtaccacatgtggctgagcgcgttctgcgacaggctgcgcttctcgcgccacggcttaacctgcaggcgtaagcattgcccggcatccagcaatggctgaatctgctggccgatggccgcgaagttaccgcgatggagtttgatgccgtctactggcagagtcatacggcctccctaacggaaaccgcagaatgcagaaaatcgcaggtgcatttctgcatctgtgacaaggtgatgagttcagattgtggtcgcatttaagtccccttaaatgcgcagaagtcaccggagttgttcaggctccgatgagaggattatggcggattgattacgataaatcaaaactatcttgaagccaaaacagtgatcttcgctttaaaaaccttgtatactttcacctaatcacagccagaactatggatctaaccaatgaccaacaaagaaaacaaagataaatatattaacaagttcaagaaagagctttcaaaatatatacaaccaactgctggagtggacattcaattatttaactctaaggatggtggtggtgtaattaaagccactttgaatagaagtggaaaaagaaaatcatctattgctggtaattttactaaattaggtgaggcaattacctcgagtgggcagagggtttttggtggtgatctatcaaatgtgaatttttacggaacaaatacgatttttgatggagatacaatatttttaattaaatcacctgattcagaggagtggtcatcacaaaaagcttccaaagacgtagagggcatcgtatttggagggaaaaaatgattaacattactactaaggatggcactcaagtcagtggtgaagtaagagatctagtaattcttcttgaaactgatggaaaaacggtgtctgattatttgcagccaatccctcccaaaaaagatacacactggagcatgattttcattccggtagcaatttatatactacttaatcttgtatacattattgctcacccattatttcctgaaaaatatctaaaaacatcaacatctatatttctattcatttccttcatattaagtgcaatagtagcatattttgttttccataagcataaatctgccactctatccatatgcagcttagtgttcttagtgttaattgtaggtgctaacgtagggtttatcagttacagcgacctaacacaaaaagcgacgcaaaaattagatagtttgtctaaataattatgttgccatgcgaagtatgcatggctgcatgtctgccttccatttaaaatgggctaagacctataaccctaaatattattctttattatcttctttaccacttcggtgatgctgccaacttactgatttagtgtatgatggtgtttttgaggtgctccagtggcttctgtttctatcagctgtccctcctgttcagctactgacggggtggtgcgtaacggcaaaagcactgccggacatcagcgctatctctgctctcactgccgtaaaacatggcaactgcagttcacttacaccgcttctcaacccggtacgcaccagaaaatcattgatattgtcagcgccagtgatataagacggtaattcgccatttggattgtccgctccacccaacatgttgtttccttaaggttctcacaccagaaaggacatcaacatgctgagcagagaggacttttacatgataaagcaaatgcgccagcagggcgcgtacatcgtcgatattgcgactcagattggttgctctgaacggacggtcagacgctacctcaaataccctgaaccgccagccagaaagacccgccacaaaatggttaagctgaaaccgtttatggattacatcgacatgcgcctggcagagaatgtctggaatagcgaggttatcttcgcggagattaaggcaatgggttatacgggcggacgttccatgctgcgttactacatccagcccaaacgtaaaatgcgtccgtcaaaaagaacagttcgcttcgaaactcagcctggataccagctccagcatgactggggcgaagttgaggtggaggttgccgggcaacggtgcaaagttaactttgcggttaatacgctggggttctcccgcagcttccatgtcttcgccgcaccaaaacaggatgctgagcatacctacgaatcactggttcgcgccttccgctacttcggtggttgtgtgaaaacggtgctggttgataaccagaaggctgcggtgctgaagaataacaacgggaaagtcgtgttcaactccggattcctgttgctggctgaccactataacttcctgccacgggcatgccgtccacgcagggccagaacaaaaggtaaggttgagcggatggtgaaatacctcaaggagaacttcttcgtccggtaccgcaggttcgacagcttcactcatgtcaatcaacaactggagcaatggatagccgatgtggctgacaaacgggagcttcgccagttcaaagaaacgccggaacagcgcttcgcgctggagcaggaacatctgcagccgttaccggatacagacttcgataccagttacttcgatatccgccatgtgtcctgggacagctatatcgaggttggtggtaatcgttacagcgttcccgaagcgctgtgtggtcagccggtatcgatacgaatatcgctggatgacgagttgcggatctacagtaatgagaaactggtggcctcacatcgcctctgttcagcatcgtctggctggcagacagtgccggagcatcacgccccgctctggcagcaggtcagtcaggtggaacatcgaccactgagtgcctatgaggagctgttgtgatgcatgaactggaagtcctgctgagtcgcctgaaaatggagcatctgagttatcacgttgaaagcctgctggaacaggcagctaaaaaagagctgaactaccgggagttcctgtgcatggcgctacagcaggaatggaacggcaggcatcagcgcggtatggagtccaggctgaagcaggctcgtctgccgtgggtcaaaacgctggagcagttcgactttaccttccagccgggcatcgaccgtaaggttgtccgggaactggctggtctggcgttcgtggagcgcagcgaaaacgtgatcctgctgggccctcctggtgtcggaaaaactcatctggccatagctcttggcgtgaaagcggtggatgcgggacatcgggtactgtttatgccactggacagactgatcgcgacactgatgaaagcgaaacaggaaaaccggctggagcgtcagctacagcaactgagttatgcccgggtgttgatcctggatgaaataggctatctgccgatgaacagagaggaagccagtctgttcttccggctactgaaccgtcgatatgaaaaagcgagcatcatactgacgtcaaacaaagggttcgcagactggggagaaatgttcggagatcacgtactggcaacagcgatcctggatcggctgctacatcactcaaccacgctgaatatcaaaggagagagttaccggttaaaagagaaacgtaaagctggagtgctgaccaaaaacacaacgccaatcagtgatgatgaaatggtggaaagcggacagcatcagtaacgaaagtatttagcgggcatgaaaatggcaaataacggtcaaacatcgtggcgttgacaatatggccatgaatggcgttggatgccgggcaactgcacgcattatgggcgttggcctcaacacgattttacgtcacttaaaaaactcaggccgcagtcggtaacctcgcgcatacagccgggcagtgacgtcatcgtctgcgcggaaatggacgaacagtggggctatgtcggggctaaatcgcgccagcgctggctgttttacgcgtatgacagtctccggaagacggttgttgcgcacgtattcggtgaacgcactatggcgacgctggggcgtcttatgagcctgctgtcaccctttgacgtggtgatatggatgacggatggctggccgctgtatgaatcccgcctgaagggaaagctgcacgtaatcagcaagcgatatacgcagcgaattgagcggcataacctgaatctgaggcagcacctgacacggctgggacggaagtcgctgtcgttctcaaaatcggtggagctgcatgacaaagtcatcgggcattatctgaacataaaacactatcaataagttggagtcattacccgcttgcagtaacggcgaaaggggcaatgacagcgctgccatgtcgacaagaactggaatagtgagaagtaaacggcgaagtcgctcttatctctaaataggacgtgaattttttaacgacaggtaggtaattatggcactgaatattccattcagaaatgcgtactatcgttttgcatccagttactcatttctcttttttatttcctggtcgctgtggtggtcgttatacgctatttggctgaaaggacatctaggattgacagggacggaattaggtacactttattcggtcaaccagtttaccagcattctatttatgatgttctacggcatcgttcaggataaactcggtctgaagaaaccgctcatctggtgtatgagtttcatcctggtcttgaccggaccgtttatgatttacgtttatgaaccgttactgcaaagcaatttttctgtaggtctaattctgggagcgctcttttttggcctggggtatctggcgggatgcggtttgcttgacagcttcaccgaaaaaatggcgcgaaattttcatttcgaatatggaacagcgcgcgcctggggatcttttggctatgctattggcgcgttctttgccggcatattttttagtatcagtccccatatcaacttctggttggtctcgctatttggcgctgtatttatgatgatcaacatgtgttttaaagataaggatcaccagtgcgtagcggcggatgcgggaggggtaaaaaaagaggattttatcgcagttttcaaggatcgaaacttctgggttttcgtcatatttattgtggggacgtggtctttctataacatttttgatcaacaactttttcctgtcttttatgcaggtttattcgaatcacacgatgtaggaacgcgcctgtatggttatctcaactcattccaggtggtactcgaagcgctatgcatggcgattattcctttctttgtgaatcgggtagggccaaaaaatgcattacttatcggtgttgtgattatggcgttgcgtatcctttcctgcgcgctgttcgttaacccctggattatttcattagtgaagctgttacatgccattgaggttccactttgtgtcatatccgtcttcaaatacagcgtggcaaattttgataagcgcctgtcgtcgacgatctttctgattggttttcaaattgccagttcgcttgggattgtgctgctttcaacgccgactgggatactctttgaccacgcaggctaccagacagttttcttcgcaatttcgggtattgtctgcctaatgttgctatttggcattttcttcctgagtaaaaaacgcgagcaaatagttatggaaacgcctgtaccttcagcaatatagacgtaaacttttccggttgttgtcgatatctccctatccctcaaccggaaaataataatactaaagtgcttagcccggctaataatcacctaatccaaacgcctcattcatgttctggtacagtcgctcaaatgtacttcagatgcgcggttcgctgatttccaggacattgtcgtcattcagcgacctgtcccgtgtatcacggtcctgcgaattcatcaaggaatgcattgcggagtgaagtatcgagtcacgccatatttcgctatcaggattctgtgtgatggttacatcgcccggcccagggctgtttagtcatcagcgctttctgacagtgctgagatttcaacctgttgcagtaaaaatgagtagatataaggcaagtgtgctgccaaacccatcttttacggggtgaaggtagatttcgtttgaagggtatctggtgtcccctgcagacatctacttgaggcggcaggggattgattggaatgctgttttttagatttgaaaaatattttacccgctattttacccattggcgcggcttaagagcttatttttgaattcacaatggtcacgatataaccatcttgctcgtccgtggataactttggctttaggcaggtcgccggacttaatccggtcatagatgaaggtcttaccgaagccagtatcagccatgatgaatttcaaatcaaccagtgaatcaggttgtagttcgtgttgcatgagtgctatctccgaatatggaatcgaacctgcaaatcaggcaataaaaagccgcattgatgcagcaatggtaggtctggatatcttgagaaatgaacaggcctcatcgagtgtgaggcgggttagtccttgcgtagctcgctgattcttctgtaagtctctggtgctttgttcccgtacgtcttcatttcagacttcaacagagcaacgagtgaatcccattcgttgaggattcctttgaatgccggaacgcgctttgcaaccttgtcgaatgaatctctgatttctggaatctgctcaacaagtgcaacgcatcgccgaaagtctgctgcgtcatggggagcgccgaagtgatgaccatagatattctttttcaggccacatgcgattgaggcaagagttgcgctactgatgccgacatcgccagttgattgccatttcaaaaccttcatagccaaatctgacatttcttgtctccataaaacaaaactcgccgtagcgagctcagataaaagaaatccccgtcagtgcgaggatgctgttcattgctgctatacacttttttgctctcaacgtaagcggtagcccattctgttgggttggtcagttgcttttaggaaatgctctttaccccttaaacgtcggctgaaagagctaaaatccatgcaaaaaatttacgcaattttgtgtattattgtgcagtaagtaatgagctattttctgtgcaaaaaatggatgataaatttgtccggggcaggaaaaattttatgggcgctaaacatgaaaaaagattcgtatccttatttgatttgcatgacagtttcagggctgatctttattttccttttcttctggtggcgggcagatatctacagggtcacgtttcttaatcagagtatatcccactattacattctgtttagcatgggaatagcttttctgttatctctgttttgggttaagaaggggatagtaaaacaaagcggctggaagagtctgtcagcataccttaaggtttatgcagggatatgcatattttctggattttttctgattataccccttacaacactaacttattttttgcctggagagacatcgtcttatgttgcaccgtatcggtatacttccggtagttcaaaaagttgttctggagctgaggtggatgaccccgatctacatgagaatattcgcatttgctatccgtatggcaattatgagtacgataatattatctatgttgaaaagaaaattaatacattaggtgcggtagtgacatatgcacagaccgcgcgtgatgatactgaatgagatagtatatagcgggcaagttttagttaatttatcgaggtaatataatttacctcgactcgtttattctggtatgaatatttcgctttacgatcgatttttatctgatgatatcatgcggttttcatatactgacttactgtcttttggtaatgactccaacttattgatagtgttttatgttcagataatgcccgatgactttgtcatgcagctccaccgattttgagaacgacagcgacttccgtcccagccgtgccaggtgctgcctcagattcaggttatgccgctcaattcgctgcgtatatcgcttgctgattacgtgcagctttcccttcaggcgggattcatacagcggccagccatccgtcatccatatcaccacgtcaaagggtgacagcaggctcataagacgccccagcgtcgccatagtgcgttcaccgaatacgtgcgcaacaaccgtcttccggagactgtcatacgcgtaaaacagccagcgctggcgcgatttagccccgacatagccccactgttcgtccatttccgcgcagacgatgacgtcactgcccggctgtatgcgcgaggttaccgactgcggcctgagttttttaagtgacgtaaaatcgtgttgaggccaacgcccataatgcgtgcagttgcccggcatccaacgccattcatggccatatcaatgattttctggtgcgtaccgggttgagaagcggtgtaagtgaactgcagttgccatgttttacggcagtgagagcagagatagcgctgatgtccggcagtgcttttgccgttacgcaccaccccgtcagtagctgaacaggagggacagctgatagaaacagaagccactggagcacctcaaaaacaccatcatacactaaatcagtaagttggcagcatcaccctgcaagcgctccgcaacgttgagcgagatcgataattcgtcgcatttctctctcatctgtagataatcccgtagaggacagacctgtgagtaacccggcaacgaacgcatctcccgcccccgtgctatcgacacaattcacagacattccagcaaaatggtgaacttgtcctcgataacagaccaccaccccttctgcacctttagtcaccaacagcatggcgatctcatactcttttgccagggcgcatatatcctgatcgttctgtgtttttccactgataagtcgcctgaagtggtcaacaaaaactggccaccgagttagagtttttccagtatcgattttccgattcgtttgggggtaacccaccgttatattcgtgcggtcttagtgcgctgtaatatccaacgatatagtccgttatggcgtgagctgcctcgctgaagcttacgtaacccaccaccggcatccattcgttcttcagactcctgaagaagcgttccattgggctgttatcccagcagtttccgcgccggctcatactctgtctgatctggtatcgccacaataactgccggaactgcctgctcgtataatgactgccctgatcgctgtggaacatcaccccgccgggcttaccacgggtttcccatgccatttccagcgctttcatggtgagcctgctgtccggcgagaacgacatggcacagcccactggttttcttgcgaacaggtcgagaacaacggcgaggtacgcccagcgcttacccgtccagatataggtcacatcaccgcaccacacctgatttggctcggtcacggcgaactgcctttcaaggtagttagggatagcaacatgttcatgaccaccacgtttataccggtgagtcggctgctgacagctgaccagccccagctctttcatgagcctgccagcaagccagcgtcccatctggtagcctctccgggttgccattgtggcgatgcttcttgctccggccgaaccgtggctgatgccatgtagctcaagtacctgactgcgtaatacagcccgtctgccgtctggtttttcaggacggtttttccagtatctgtagctgctgcgatgaaccccgaacacatggcagagtgtgaccacaggataatgcgctctgagtttcccgattatcgagaactgttcagggagtctgacatcaagagcgcggtagccttttttaatatttcattctccatttcaatgcgttgtagctttttcctcagcttacgtatttcgatttgttctggtgttatcggagaggcttttggtgttttgccctgacgctcatcacgcagttgtttgacccatcttgtcattgtggaaaggccaacatccatagctttggcggcatctgccaccgtgtatttctggtcaacaaccagttgagcggattcgcgtttaaactctgcgctaaaatttctttttttcattggagcacctgtgttgttctgaggtgagcatatcacctctgttcaggtggccaaattcagtgtgccacttcagccattcttcttccgagagcttgacgacatccgccagttgtagcgcctgccgcaaacacaagcggagcaaatgctcgtcttgccatagatcttcacgaatattaggatcgaagctgacaaaacctccggcatgccggatcgccgtcatcgcagtaaatgcgctggtacgcgaaggctcggcagacaacgcaattgaacagagatgtaaccattcgccatgtcgccagcagggcaagtctgtcgtctctaaaaaaagatcggcactggggcggaccataaacgtaaatgaacgttccccttgatcgttcagatcgacaagcaccgtggatgtccggtgccattcatcttgcttcagatacgtgatatcgactccctcagttagcagcgttctttgcattaacgccccaaaaggatcatcaccgacccgacctataaatccacttattccgcctaatctggcgattcccaccgcaacgttagctggcgcgccgccaggacaaggcagtaggcgcccgtctgattctggcaagagatctacgaccgcatcccctaaaacccatactttggctgtaatgccgatcagttaaggatcagttgaccgatccagtggctgtgtaagaatccggaaacgctcacttgtttccggatttttttatgcacattggacaggctcttgatctggtatcccgttacgattctctgcgtaacccactgacttctctgggggattacctcgaccccgaactcatctctcgttgccttgccgaatcaggtactgtaacgctacgcaagcgccgtcttcccctcgaaatgatggtctggtgtattgttggcatggcgcttgagcgtaaagaacctcttcaccagattgtgaatcgcctggacatcatgctgccgggcaatcgccccttcgttgcccccagtgccgttattcaggcccgccagcgcctgggaagtgaggctgtccgccgcgtgttcacgaaaacagcgcagctctggcataacgccacgccgcatccgcactggtgcggcctgaccctgctggccatcgatggtgtgttctggcgcacaccggatacaccagagaacgatgcagccttcccccgccagacacatgccgggaacccggcgctctacccgcaggtcaaaatggtctgccagatggaactgaccagccatctgctgacggctgcagccttcggcacgatgaagaacagcgaaaatgagcttgctgagcaacttatagaacaaaccggcgataacactctgacgttaatggataaaggttattactcactgggactgttaaatgcctggagcctggcgggagaacaccgccactggatgatacctctcagaaagggagcgcaatatgaagagctcagaaaactgggtaaaggcgatcatctggtgaagctgaaaaccagcccgcaggcacgaaaaaagtggccgggactgggaaatgaagtgacagcccgcctgctgaccgtgacgcgcaaaggaaaagtctgccatctgctgacgtcgatgacggacgccatgcgcttccccggaggagaaatggcggatctgtacagtcatcgctgggaaatcgaactgggatacagggagataaaacagacgatgcaactgagcaggctgacgctgagaagtaaaaagccggagcttgtggagcaagagctgtggggtgtcttactggcttataatctggtgagatatcagatgattaaaatggcggaacatctgaaaggttactggccgaatcaactgagtttctcagaatcatgcggaatggtgatgagaatgctgatgacattgcagggcgcttcaccgggacgtataccggagctgatgcgcgatcttgcaagtatgggacaacttgtgaaattaccgacgagaagggaaagggccttcccgagagtggtaaaggagaggccctggaaataccccacagccccgaaaaagagccagtcagttgcttaactgactggcattaatactttggctgacatttttttcccttaaattcatctgagttacgcatagtgataaacctctttctcgcaaaatcgtcatggatttactaaaacatgcatattcgatcacaaaacgtcatagttaacgttaacatttgtgatattcatcgcatttatgaaagtaagggactatatttttataaaagttaacgttaacaattcaccaaatttgcttaaccaggatgattaaaatgacgcaatctcgattgcatgcggcgcaaaacgcactagcaaaacttcatgagcaccggggtaacactttctatccccattttcacctcgcgccacctgccggatggatgaacgatccaaacggcctgatctggtttaacgatcgttatcacgcgttttatcaacatcacccgatgagcgaacactggggaccaatgcactggggacatgccaccagcgacgatatgatccactggcagcatgagcctattgcgctagcgccaggagacgataatgacaaagacgggtgtttttcaggtagtgctgtcgatgacaatggtgtcctctcacttatctacaccggacacgtctggctcgattgtgcaggtaatgacgatgcaattcgcgaagtacaatgtctggctaccagtcgggatggtattcatttcgagaaacagggtgtgatcctcactccaccagaaggaatcatgcacttccgcgatcctaaagtgtggcgtgaagccgacacatggtggatggtagtcggggcgaaagatccaggcaacacggggcagatcctgctttatcgcggcagttcattgcgtgaatggaccttcgatcgcgtactggcccacgctgatgcgggtgaaagctatatgtgggaatgtccggactttttcagccttggcgatcagcattatctgatgttttccccgcagggaatgaatgccgagggatacagttaccgaaatcgctttcaaagtggcgtaatacccggaatgtggtcgccaggacgactttttgcacaatccgggcattttactgaacttgataacgggcatgacttttatgcaccacaaagctttttagcgaaggatggtcggcgtattgttatcggctggatggatatgtgggaatcgccaatgccctcaaaacgtgaaggatgggcaggctgcatgacgctggcgcgcgagctatcagagagcaatggcaaacttctacaacgcccggttcacgaagctgagtcgttacgccagcagcatcaatctgtctctccccgcacaatcagcaataaatatgttttgcaggaaaacgcgcaagcagttgagattcagttgcagtgggcgctgaagaacagtgatgccgaacattacggattacagctcggcactggaatgcggctgtatattgataaccaatctgagcgacttgttttgtggcggtattacccacacgagaatttagacggctaccgtagtattcccctcccgcagcgtgacacgctcgccctaaggatatttatcgatacatcatccgtggaagtatttattaacgacggggaagcggtgatgagtagtcgaatctatccgcagccagaagaacgggaactgtcgctttatgcctcccacggagtggctgtgctgcaacatggagcactctggctactgggttaacataatatcaggtggaacaacggatcaacagcggacaagggatccgcgtcactcttcccccttcacgaccttcaataatatgcaatgcagcttcccgcccgataatgtcatgtggaagctgaattgtggtcagcggcggtaaaaacagatgcccgacgccaaccagattatcaaagcccattacggcgacatcctgcgggatacgtacccccttcgccaggagaacctgataagcgacaaaggctgcacgatcgttaccacatatcagaacatcaaaatctggtttgcccgatttgaagtgggcattgagtaaacttgcgagatcggtgtagtgatcatcacctgttgccatgtgaaattgtttcacctcagccagatctcgtccagcatcacgccaggcctgctcaaatccctgccgacgataccctgttgccaacgcactttccggtagccagaagcataacggttgacgatagcccgccgcgagcaaatgctgtgttgattcatattgtgcagtgtaatcatcagggatataactgggtaacgctgggtcatccgccacacagttcgccaatacaatattttcaccatacagagactcaggcagcgtgatatgtcgcagccccattgtagtatagataatgccatccggacggtgggcaagcagctgacgtgccgcgcgggcagcgtcatcttcagaaaaaatattgattaaaaaactattccagccgaactcgctggcggtttgctcaatggcaagcagaatatcaacagagaaaggagtggtagccgtgtcctgcgccagcacggcgagagtcgacggcttacgtccttgagcgcgcatcttacgggcggaaagatcaggaacataattcagggtctggattgcctgcaatacgcggtcacgcgttgcaggacgcacagattctgcattatgcatcacccgggagactgtcatcatcgacactcccgccaggcgtgcgacatcctttaatgaagccatacccaagccgtttgccgtaaaacgggcactgtagcagaaacagacgtcactggcgagatccaacgccctatcacctgacacagcaatacaataaaaaataacaataattcccggacaattgtccccaattccgcctctgttctcgccaacgagtaaccatataggcaagtaagtaaaacatgccaactggcatcgccaacctggagaagaaaatataaatatggatcattgtgctgccgctgtatcccgacatcagcccggaaattattgcgattgctatcggttcaggtgcaattggctgcacgatcgttacggactcgcttttctggctagtgaagcaatattgcggcgctacgctcaatgaaacatttaaatactatacgacagcgacatttatcgcttcagtcgtcgctctggcgggcacattcctgctgtcatttatcatctaagcgcaaagagacgtactatggaaaacgctaaaatgaactcgctcatcgcccagtatccgttggtaaaggatctggttgctcttaaagaaaccacctggtttaatcctggcacgacctcattggctgaaggtttaccttatgttggcctgaccgaacaggatgttcaggacgcccatgcgcgcttatcccgttttgcaccctatctggcaaaagcatttgctgaaactgctgccactggggggattattgaatcagaactggttgccattccagctatgcaaaaacggctggaaaaagaatatcagcaaccgatcagcgggcaactgttactgaaaaaagatagccatttgcccatttccggctccataaaagcacgcggcgggatttatgaagtcctggcacacgcagaaaaactggctctggaagcggggttgctgacgcttgatgatgactacagcaaactgctttctccggagtttaaacagttctttagccaatacagcattgctgtgggctcaaccggaaatctggggttatcaatcggcattatgagcgcccgcattggctttaaggtgacagttcatatgtctgctgatgcccgggcatggaaaaaagcgaaactgcgcagccatggcgttacggtcgtggaatatgagcaagattatggtgttgccgtcgaggaaggacgtaaagcagcgcagtctgacccgaactgtttctttattgatgacgaaaattcccgcacgttgttccttgggtattccgtcgctggccagcgtcttaaagcgcaatttgcccagcaaggccgtatcgtcgatgctgataaccctctgtttgtctatctgccgtgtggtgttggcggtggtcctggtggcgtcgcattcgggcttaaactggcgtttggcgatcatgttcactgcttttttgccgaaccaacgcactccccttgtatgttgttaggcgtccatacaggattacacgatcagatttctgttcaggatattggtatcgacaaccttaccgcagcggatggccttgcagttggtcgcgcatcaggctttgtcgggcgggcaatggagcgtctgctggatggcttctatacccttagcgatcaaaccatgtatgacatgcttggctggctggcgcaggaagaaggtattcgtcttgaaccttcggcactggcgggtatggccggacctcagcgcgtatgtgcatcagtaagttaccaacagatgcacggtttcagcgcagaacaactgcgtaataccactcatctggtgtgggcgacgggaggtggaatggtgccggaagaagagatgaatcaatatctggcaaaaggccgttaataacgtttcaacgcagcatcgcaatcctttccctgggtgagcgatgctgccgatggcgcagacttaagatccccggtcttacccgctataaccccctccttttatcatcacccaacgcctttcgctgtaaacggcggtttcgcaaaccaaaccaaaaccgtaagtaagataaaagcaatagccgccatacggaaaatctcatttgcagaaatagaaagtgactgctgggttatttcattattaatttcattaagaactcctgaaagcgaaccataatatttatccataatttgtgacgatgaattaaacacggggttaaattgatcgatggttgctgtcaactgactatggtgtaacgattcgcgtcgtccccacagcgtcattgtcaacgacgtaccaactgatcctgacaaggtacgaaaaaaattactcatactcgaggcattggcaaatttattatctggcaagcctgaaaacgaaatcgttgttaagggtaaaaagaaacaggcaacggcgaatccctgaaaaaactgcggcaaaatgatgcctgtaaaatcaatcgttggcataaatgtcacagaacgccagtaatagcaaaccgcatacatcaaaaaactaaatgtcactaacaaccgcatgtctattttgttgccataacgtcctatcaaaggtgaaattaatagtggcatgatgccgatgggcgcataagcaagtccggcccatatcgcattataccccatcgtttcctggagtaactgcggcataaggacgatcgctccagagtaaaataaatacgcgcatgtgatactcacaataccaatggtgaagttacgggacttaaacaaactgagatcaagaatcgggttctctgaggtcgactcccaaatgactaaagagatcagagaaataactgatactactgttaatattattattgtactcgagttgaaccaatccagatcgcgccctttatcaagcataatttgcaagccaccaacaccgagcactaacagggtcagtcctggtagattcattttgaccggtgaagtctcagtttctcttcctttaagtaaggttaagcataatgtcaggacgataatccccatagggacattgattaaaaatatccaaccccagctaaagttatcacaaatataaccgcccaatatcggcccacatatcggagcgataatcacggtcattgaccataatgccagagcaaatgttcttttttctggcggataattccttaataataaactctgtgacagtggaattaacggccccgccattaacccctgaacgactctaaaaaatatcagcacatcaagattggtcgataggctacacattaatgaagacagcgaaaaaaaggttactgaaagtaaaaataatcttaattcgcctattctttgtgccaacctgccagtaacagggatcgcaatggcatttgctacaccaaacgaggtgataacccaggtgccttcgtctgttgatgctcccagaaagccagatattgtcggtattgcgacgttagaaatagtggaatccaacatttgcataaatgtcgctaatgacaatgcaatagtgacgcaccataacgtcccaccggttaatggtgccggagttgatttagtgattgccattaaagttgtccattatgcgaaataatgttgctaatttctttttctatcggactggtatcgataactaaagccttactggtataagccggcatggaggtcacggttgaagccagctcaggcatctcagcaatgtcttcgtccttcgtatcaatagttgcagtcatcgataaaccaatgcgcaaggggtgttccatgagttcttttggatcaagagaaacttcaaccggtacacgctgaacgattttgatccagttccctgtcgcattttgtgcaggtaataaggagaacgcattgccggttcccatattgatccctgtcacccgaccatgaaacacaacattttcaccataaagatcgctgataatattgactgattgaccaatccgtacatccgtgagttgtgtttctttaaagttggcattaacccacatttgacgtgccggtacgacagccattaacgattgtccgggactcactgtttcgccgacctgaacacttcgctgggcaatatagccagtaaccggactccttatatccgtacgtttaagcgccaaccaggcttctttggttgcatccgccgcttcaactacttgtggctgacggtttaatggtgtgttcattactaaagctttattcgctttataagcctggatagcggcattcagtgccgctttgctacttattaacgtatctttggtatgctccagcgtttcttttgaaataaccccctgcttcgctaaaggcacacgacggttataatcttctaaggattgttgatactgaatacgtgctgaagcgacttcggcactgtattgtttatcctgtaagtacagtttattcgtttgccgaacaatatttgccagattatttttagctttattgagtgcgatagtggcatcagttttatccagtgaaactaaaatgtcaccctgtcgaacgtagttcgtatctttatgattaactacagtgacactacctgagacttgtgcagaaattggatctgcattccccgtgacataggcgtcatctgtactaatcatgtcttctaattccattgaccaataggcataggcacctgaaaacgcaataaataaaactatcaccaataaagaaaagtatttttttctgttagactgttttttatttgaattaatctgttccactattatctctcatttcgcatagatgaaatttatgaattgaatgaaaagagtattcattcttcatatcaaacacagtgcatgtgttgcacattatcccaggaacgttggaggcctaatttaaatgaggtgcaaaaaaaacaacagaggactaaaccgtggcttttgcaatacaattcttacgcctgtaggattagtgagaagacttatagtgctaacttgaaactataaatcatcagtataatccctgattttattgttgacatttcatttatgccgactatttatatggtatacttgtcgaattatcttaaaggaagctcagattttcttatttttattgagaaaatgagatgacgccttatgtctgtattactacagggagaagggagatgcttcattgcaaagggaataatctatgaacgcaataattattgatgaccatcctcttgctatcgcagcaattcgtaatttattgatcaaaaacgatattgaaatcttagcggagttaactgaaggcggaagcgccgttcagcgggtggaaacacttaagcctgatatcgtcatcattgatgtcgatatccccggagttaacggtatcctggtgttagaaacgctgaggaagcgccaatatagcggaattattattatcgtctccgctaaaaatgaccatttttacgggaaacattgtgctgatgctggcgctaatggtttcgtgagtaaaaaagaaggcatgaacaatatcattgcggctattgaagctgcaaaaaatggctactgctatttccccttctctctcaaccggtttgttggaagtttaacgtccgaccagcaaaaactcgactccttatcgaaacaagaaattagtgtcatgcggtatattcttgatggcaaggataataatgacattgcggaaaaaatgttcatcagcaacaaaactgtcagcacttataaaagtcgcctgatggaaaaattagaatgtaaatcactgatggatctttacacattcgcacaacgtaacaaaatcggctaaccacatgaagtttttaccctatatttttcttctctgttgtggtctttggtcgaccataagtttcgcagacgaagattacatcgaatatcgtggcatcagtagtaacaaccgtgtcatacttgatccagtacgtctgagcaacaaggaattacgttggttagcgagcaaaaaaaatcttgtgattgcagtacataagtcccaaacggctacgttgttgcataccgattcgcagcaacgagttcgtggtattaatgctgattatttaaatcttttaaaaagaacgttaaatatcaaattaacactccgggaatacgccgatcatcaaaaagcaatggacgcgctggaagaaggtgaagtcgatatagtgttatcacatttagtagcttcgccgcctcttaatgatgacattgctgcaaccaaaccactgataattacctttccggcgctggtaaccacccttcacgattcaatgcgaccgcttacctcatcaaaaccagtaaatattgctcgagtagcaaattatccccctgacgaggtaattcatcaatcatttccaaaagcaacaattatctcttttacaaatttatatcaggcattagcatccgtctcagccggacagaatgattactttattggtagtaacatcattaccagcagtatgatttcccgctatttcactcactccttaaatgtagtgaaatattataactcaccgcgtcaatataattttttcttgaccagaaaagaatctgtcgttcttaatgaagtactcaatcgatttgttgatgctttgacaaatgaagttcgctatgaagtatcacaaaattggcttgatacaggaaacctggcctttctgaacaaaccattagaactcactgaacatgaaaaacaatggattaagcagcatcccgatttaaaggtgctggaaaatccttactcccctccctattctatgacggatgaaaatggctcggttcggggcgttatgggggatattcttaatattattactttgcaaacaggtttaaatttttctccgatcaccgtttcacacaatatccatgctggaacacagctgaatcccggcggatgggatatattacccggtgctatttatagtgaagatagagaaaataatgttttatttgctgaagccttcataacaacgccttacgtttttgtcatgcaaaaagcgcctgacagtgaacaaacattaaaaaaaggaatgaaagttgccattccatattattatgagcttcattcgcaattaaaagagatgtatccggaggtagagtggataaaagtcgataacgccagcgctgcatttcacaaggtcaaggaaggcgaacttgatgctctggtcgcgacacagttaaattcacgttacatgatcgaccattactatcctaatgaactttatcattttcttattcccggcgttccgaatgcatcgctttcgttcgcttttcctcgcggagaaccggaacttaaggatattattaataaagcactgaatgcaatccccccaagcgaagttctgcgcctgaccgaaaaatggattaaaatgcccaatgtgaccattgacacatgggacctctatagcgagcaattttatattgttacgacattatccgttttattagttggcagtagccttttatggggattctacctgttacgctcagttcgtcgtcgtaaagtcattcagggtgatttagaaaaccaaatatcattccgaaaagcactctcggattccttaccgaatccaacttatgttgtaaactggcaaggtaatgtcattagtcataatagtgcttttgaacattatttcactgcggattactacaaaaatgcaatgttaccattagaaaacagtgactccccctttaaagatgttttttctaatgcgcatgaagtcacagcagaaacgaaagaaaatcgaacaatatacacacaggtttttgaaattgataatggcatcgagaaaagatgcattaatcactggcatacattatgcaatctgccagccagcgatcatgctgtttatatttgtggttggcaagatattacagagacgcgtgatttaattcatgcactcgaagtagagagaaataaagcgatcaatgcaactgtcgcaaaaagtcagtttctggcaacaatgagtcacgaaataagaacaccaataagctccattatgggcttcctggaacttctgtcgggttctggtcttagcaaggagcaacgggtggaggcgatttcacttgcctactccaccggacaatcactcctcggcttaattggtgaaatccttgatgtcgacaaaattgaatcgggtaactatcaacttcaaccacaatgggtcgatatccctactttagtccagaacacttgtcactctttcggtgcgattgctgcaagcaaatcgatcgcattaatttgcagcagtacatttcctgatcattacctggttaagatcgaccctcaggcgtttaagcaggtcttatcaaatttactgagcaatgctctcaaatttaccaccgagggggcagtaaaaattacgacctccctggttcacattgatgacaaccacgctgttatcaaaatgacgattatggattctggaagtggattatcgcaggaagaacaacaacaactctttaaacgctacagccaaacaagtgcaggtcgccagcaaacaggatctggcttaggcttaatgatctgcaaagaattaattaaaaatatgcagggcgatttgtcattagaaagtcatccaggcataggaacaacatttacgatcacaatcccggtagaaattagccagcaagtggcgactgtcgaggcaaaagcagaacaccccatcacactacctgaaaagttgagcatattaatcgcggatgatcatccgaccaacaggctattactcaaacgccagctaaatctattaggatatgatgttgatgaagccactgatggtgtgcaagcgctacacaaagtcagtatgcaacattatgatctgcttattactgacgttaatatgccgaatatggatggttttgagttgactcgcaaactccgtgagcaaaattcttccttacccatctgggggcttacagccaacgcacaggctaacgaacgtgaaaaagggttaagttgcggcatgaacttatgtttgttcaaaccgttgaccctggatgtactgaaaacacatttaagtcagttacaccaggttgcgcatattgcacctcagtatcgccaccttgatatcgaagccctgaaaaataatacggcgaacgatctacaactgatgcaggagattctcatgactttccagcatgaaacgcataaagatctacccgctgcgtttcaagcactagaagctggcgataacagaactttccatcagtgtattcatcgcatccacggtgcggctaacatcctgaatttgcaaaagttgattaatattagccatcagttagaaataacacctgtttcagatgacagtaagcctgaaattcttcagttgctgaactctgtaaaagaacacattgcagagctggaccaggagattgctgttttctgtcagaaaaataactaaatagcggctcccacaatgttctaatgtgggagctatttaccagcacatcttacatttatgatgagaactcctggcgaatttgttccccatgctggtcgagcgttgccgctcccggcataacatgcgggtccgcgcagccgctgatttttatcggattacccggcatcattattcctccggcttcaatcaacatatttctcgcctgagtttgtggcaaattaatggcctcagccacacttaataacggcgcgacgggcacaccaacttcatgtattttggctaaccaaacttcagctgcctgcgtttttaacgttcgctcaatatattgtttaagaatagcctggttttgtacgcgtaaaatattgctgctaaatcggggatcattaaccagttccgtaagctccagtgcctggcataacgcagaaaaaagcttgtcattaccacaacaaatcgtaatcggcttatcctgagtatcgaaaacatcaaaaggtgccatgtagggatggcgatttcccaggcgttgtggtgacttccctgtcgcaatatatgccatcagaccatgctccagaaaactcagcgtggcatcaaacatcgctatatcgacatgcgcccctctctggctcttttcgcggccataaagtgcactcactattccgctgaataaatagacaccgccgcatagatccgcaagagaggtaccaacacgcactggcggagcatcagggtaccctgtttccatcattatcccactcattgcctgaatgatggtatcgtaggcaggagcatcttttagcggaccggtatgtccgaaacctgacgatgaagcatatatgaggcgcgggttgatttcttgtaacctttcccatgaaaaccccagtttttccattgtacctgggcgaaaattctcagctaatacatcagcttgtttgagcatatttataaatatacttttatcgtgatcattctttaaatcaagaaccacactctctttgccatgattaataaaactgtaatagagtgactgtccatccacatagggaccaaatgtgcgggtatcatcaccatgacctggtggctcaactttaattacccttgcgcccatattacaaagaagttgagttccgaaaggtccattaaggacatgtgtcatatcgataactaataagccttcaaacggccctttgctttcattatttgtcatttgcttatgccttgaaaaaagccgaaggtgaaaagacacttcggcatttatgtaaaatcaataacatgattaattatgaaaccagtcgactgacataaatccacaagggagccgtgacgacaaagcccagtacgctcacagccaatgacgctgtaccagtacgggtgtagacattaaaccggctggcaataatgattccggagaatgccggcggtaatgcgcctgccagtaccatcatctgcaaatgttcgctgttcaaatgacatgccataccaacgagaagcagcgccagtggcatcagaatcaacttcaggaaggtgttataagcaatttcggcactgaactcgaatttatgtgcagccagagtcaaccccgcagcgaataccgctacccctgagttagccttcgcaatcagattaaaggtcgggtcccatgctgccggaatttttaccccaaccagcaccaggatcgttgccagaacaggtgcccatactactggctcctttgccgcagaaattaatgcgctcagattactattcttcttaccatccgctcctgaggaaggattcagcaaatacagaccaataggaatagtaattgcgttaacaataatagaaataattgctaccactaaacctgttgatacggaatcaccataaataggatcgagaactgcaaaccccaggaatccaatggtaggtgaacccgcaattaatgcacatacagcggcttctgcatgggtacgtttaaaaaatttgtagcaaccaaaccaggagaaaaagaaacatccgacaataaccacaagtgatacaagggtcagacgagtgtccgcaaaaatcatttccctgtttgcccgggtaatagaaacaaatagagccgcaggaagagcgtagtttaataccagtttattaaatgcgcgggcttgatcttctgaaaaagtttctcgtctgccgctaaaataacccaacagcatgattacgataataggcaataaatcgccaataaaaaatgttagcataatagtatttccgataagggtcccctcaccatcgcataatgagttggcaagaggagacgatgtcagtatttaattaccagcgacttgttttgggttaagtttggtaatatggccactttcagttcctgcagcagggtcgatgaccacattaataatggtcggtttgcgcgactgaataccggtggttaaagcatgacgaagttcatctgtcgtggtgacgttatagccaacgccacgaaacgcatccattaatttgtcataccttgcatggtgcaacagatccgttggtgatggtgcaccagcgccactgagatcaacaccgtctcctctgtagatgccgccattattaaaaataacgatcgtcaccggcaggttatatcgacaaatcgtttcaatttccatcccactgaaaccaaaagcactatcaccttcaatggcgacaaccggagaaccagaagtcacgctagcaccgatggcatagcccataccgatgcccatgacaccccaggtaccacaatccagacgacgacgtggtttatacatatcaataatatttcgtgcattatccagggtatttgcaccttcattaactaaataaatatcctggttctcgcgcaatacgtcgcgcacagcacttaatgcattaaagtaatttaatggttgagtatctgtacttaatttttcatgcattttttgtgcattttgctgcttgtggatatttaaaatatcgcgccataccagtggagtcgtaaatgtgttttgtttcagttctgccagcataccttgcatactggatgcaatatcaccaacgactggcacagcaatggggcggttgctgtcaatttcctgcggttcaatatccagttgaataaactgtgtatctgccgcccatccttttttaccgtgtgccaataaccaattcagtcgtgcaccaacaagcatgacaacgtcagcatttgccagggcaaacgaacgcgcagctgccgcagaaagtggatgcgtatcttcaaggatccctttcgccatagacattggcaggaatggaatctgagcactttcaataaattcacgaagctgttcatcagcttgtgaatacgccgcgcctttgccaaggataattaatggccgttcagcttttgctaaaagcgaaattgcgctagtgactgacttcgggcatggcaataatgctggcgacggattttcaactttaacaatcgtggttaacgcttcgtctttttccatcgtcgcggccaggacatttgctggcaaatcaagataaactccgccagggcgacccgatacagagacccggatagcgcgtgccaatgcaatgccaagatcctgcggctgattaacgcgaaatgctgctttggcatacggttttgccgcattcatttggtccagctcttcataatcaccttgctgtaggtcgacgatcgcgcggtcgctggagccgctaatcatgatcatcggaaaaccatttaccgttgcgttggccaatgcggtcaaaccattgaggaatcctggcgcagaaactgtcaggcagatccccggtttttgggtaagaaaaccgcttgccgcagcggcatagcctgccgactgctcatgacgaaaaccaatataacgaatgccttccgcctgggcatggcgtgccatatccgtcacaggaatacctacaacaccataaatagtgtcaatattattctgttttaatgcttcaacgatgatatgcataccatctgtcatttgaagttgatctgacatgattaataacctcgaaatttttataaattgggagccagaagcccccgttaatatcagatggcgtggttttgcttcattgcagcaatttcatcgtcgctataacccagctcctgcaatacagcagcggtatgttcacctaatagcggcgcagctttaatatccggcgtaaaggcagagaatttcattggacaaccaacggtcagatattttccacgcaacggttgttccacttcaacaacactgccactttggcgcaaagagggatcaagtgaaatttctttcatacttaaaaccggtgcacaaggaatatcaaactgagtcaaataggccaccgcttcatgtttatcaatagtgacagtgtatttttcgatttcagcaaaaatatcgaaaatatgtggctgtcgggcatgggctgtactgtatgccgaatcggtaatccattctggtttgccgatggctttacaggtgttttcccagttttgctcctgaatagtgaaataaatataggcgttaggatcggtttcccagcctttacatttcaggatccagccaggctgaccgccaccacctgcattaccaccgcggggaactgcatcaccaaatgtaccattcggatactgcgggtattcttccagataacccaatttatcgagacgctgctggtcacgtaatttcacgcggcaaaggttcaatacggcatcctgcattgacatggtgactcgttgcccacgccccgttttttcgcgatgcagcaaagcagcaagtaaaccgatcagcaaatgcattccggtgttgctgtcacccaacgctgcagcgcttaccagcggcggaccatcccaaaaacccgtagtggatgccgcgccacccgctgcctgagcaacgttttcataggcttttacattcacataaggcgaacactcatcaaaccctttgatcgaaccaaaaatcagacgtggattgatttcttgaatatgctcccaggtgaagcccatgtgatcaatggcccctggatgaaagttctcgactaagatatcagcttcgcggatcagcttttccattacctctttgccttccgctgttttggtatttaactcaatagaacgtttgttactgttaagcatggtgaagtaaagcgcatcgatatcaggaatatctcgcagttggtgacgcgttacgtcaccaacgccgggacgttcaattttaataacgtcagcgccaaaccaggccagcatttgagtacaagatgggccagattgcacaccggtgaaatcgagaactttaattccttgaagtggagttgacatagcaatacctattagttaattaaatatgtgttaatttagcgtttatttaaggcataacgccctctataaataatctgcaaaatatcttcgtagcggcactcgatatttttaaattcctgtatcaagtactgaaaattatttcatcgccacttccaattcctttctgcatggtaagtagtgaggacgaaaagaagaatatgataaatatttattcgtggtaatcagagagagtcgcgacatttgtgatgttattcttacaactgtaagaagcgccggtgatttacaagtaagagtatgattacgctttttaaagcgtaccataaagcataacataataaatgatttgtgatgacactggattattgcggtttactttgaggaaaataaaatgcgtgtttatagaaccgcgagcgccaaataattttatgaccacaacctgtcgtattgtggtcataaaaaattgtcggctggagggagttaaatcctttacctcaatatactgcctgtcagcattagttcacaaacagtgcttcgctatcgacgatgattccatcttccgcacctttaagcgccaggtttgcctcgtagtattgctttttatcaagcagtttctgcgcatcagcaagtgcattacgagtctgtttaagcggcatcagatattggttttccattacgccaacaccggccaggcgaagctcttccattgcgccctttttatcccctttcgccattttttcattggcaatttttatcgcggcttctttttcgggtgttgctacataactctcagaaattccgacagatgcattaatgacaatatattggtcatcattgagattggtctttttacctggcttagcgaactttgcccattcggtactgtcatctgacagcaaagcggaagcttcattggtcagttcttttgccttttccggatcgccatgaaacagagccaggcgcgctacctgcacgtcacgcatcgcatataaaccttgttcagagatacgctctgctgctgccgttttctgggtttgctgagtttgctgttgtgccgctaccggtgcattatcagcagcccatacagttgaagatgccagaattgctgtgaccatcgtagccataattaaacgtttcatacttacctcattctttaacagttttagaaaacgccgccatcatattgggtgagcatgaaatgagaaatcagagagcaacggtcattttgaaagggttatcttacaattgtagttattatcgcaaagcggcatttagtcttacagttgtaggaatatgcttcctgtcgcagagaactattcttatataccacaaagagatgtcatttattatattgatgtaaatattgattaattatatgtaaatacagccataacatcgtatggttctcagtgaaccattttcaggataactttctatgaaagtaaacttaatacttttcagcttatttttattggtctctattatggcatgcaatgtttttgcattttccatttctggtggtgtaagtgagaggagctataaagagactgaaaaaacatcagcgatgacaaccacacactctacaaaacttcagccatctgaggtagcctgagtttaacggacactccttcctgaaatagaatggcatcagaaggagctaataatgagcagaaaaacccaacgttactctaaagagttcaaagccgaagctgtcagaacggttcttgaaaatcaactttcgatcagtgaaggcgcttcccgattatctcttcctgaaggcactttaggacaatgggttaccgccgccagaaaagggctcggtactcctggttcccgcacggtggctgaactggaatctgaaattctgcaactgcgtaaggcgttaaatgaagctcgccttgagcgagatatattaaaaaaagcaacagcgtattttgcacaggagtcgctgaaaaatacgcgttaatcgaacaatggcgacaacaatttcccattgaagcgatgtgtcaggtatttggtgtatccaggagcggttattacaactgggtacagcatgaaccctcagacagaaaacaaagtgatgagcggctaaaactggagattaaggtggcacatatccgcactcgcgaaacatatggaacccggcggctccagacggagctggcagagaatggcatcatcgttggtcgtgaccgactggcacgtcttcgtaaggagctaaggctacgctgtaagcagaaacgcaagttcagagcgactacgaactcgaaccacaatctgccagttgcgccaaatctgctgaaccagacgttcgctcctacagcaccaaatcaggtctgggtggcggacctgacgtatgttgccacacaggagggatggttgtacctcgctggcatcaaagatgtttatacgtgcgaaattgtcggctacgccatgggagagcgcatgacaaaagagctgacaggtaaagccctgtttatggcgctcaggagccagcgcccacctgccgggctaatccaccactctgatcgaggttcacagtactgcgcatacgattaccgggtcatacaggagcagtctggtctgaaaacatcaatgtcgcgtaaaggtaactgttacgacaacgctccgatggaaagcttctggggaacgctgaaaaatgagagcctgagccactatcgttttaataaccgggatgaagccatctcagtaatacgggaatacattgagattttctacaatcgtcagcgtcgtcactctcgtctggggaatatctccccggcagccttcagggaaaaatatcatcagatggctgcttaaaaaaagaacaaatggtagtgtccgctattgccagtacacctcaatcacaggcgattttgtttaagatgagagaagatgcgccaccattaaacctcacagaagaaatcacgcctacttatccgacaaaggcgaattatcttattcatcctgtgcgatagcgtctgtcacatggcaggtgaacaatcatgtctgatgctgatgtgaacacctgcccaaatgagccatcctgacccactatcgcctgccataccccaccataaagcgaatcatcaagccacaagccggggcaagaaacataaatatccccgtcaccagttcattaccgccagttaaccacatggtgaagtaataaatgagtgcagcgaggatcaccatgccgaagaaagaagagaccgccgataccacgttcagtacctgaccgatgtagccgcttacgcagacaatacacagggcgagaaacatccataaataaatcatagctcaacctcctgccgcgctaaaaaacctgtaacttcagtcactttaatagtaagacaatccttaacctctggcaatttttgctaagcatcaatgaaaacagcacgttaaatgcaacgctattgcgtgcggaaaattttttactttgcacgattaataatcagtagctgaaagcagtcagccagtgataaagtagagccaccgcattcatgctcctcgtggttatgtcctgactagtctttacactctttacaggaaccattgtcgtacatgatggcccaaccaattgagtgtaccgctgtcgacatggaatcttctgcgatacaacaattcgtatctacagaaggtaactatgtttccacaatgcaaattttcccgcgagtttctacatcctcgctactggctcacatggtttgggcttggtgtactctggctttgggtacagcttccttatcctgttctctgctttctcggcacgcgtattggcgcaatggcgcgaccattcctgaaacgtcgtgaatctatcgcccgtaaaaacctggaactttgtttcccgcagcattctgcggaagaacgcgagaagatgattgccgaaaactttcgttcactcggcatggcgctggtagaaaccggcatggcatggttctggcccgacagtcgcgtacgtaaatggtttgatgttgaagggttggataaccctaaacgcgcacaaatgcaaaatcgcggcgtaatggttgtcggcgtccattttatgtcgctggaactgggcggccgcgtgatgggactgtgccaaccaatgatggctacctatcgtccacataataatcagctgatggaatgggtgcagacccgtgggcgcatgcgctctaacaaagcgatgatcggcagaaataatctgcgcggcattgtcggtgcactgaagaaaggtgaagcggtatggtttgctcccgatcaggattatggtcgtaaaggcagctccttcgcgccgttctttgcggtggaaaatgtcgccacaaccaatggcacctatgttctctcccgtctctctggcgcagccatgttgaccgtaacgatggtaagaaaagcggattacagcggatatcgtttgttcatcaccccagagatggaaggctacccgacagatgaaaatcaagccgctgcctatatgaacaagattatcgagaaagagatcatgcgcgcaccggagcagtacctctggatccaccgtcgctttaaaacgcgcccggtgggagaatcgtcgttgtacatttaacaaactgctcttactctttccctcctcaaatcggccataataacctcatggtttttatggcttttttcttaaggttttttccttcgctgaatatctaattattaccgtcagaaattaaactgtcgccgatatgagacacttgtaagttactaaaagtaaataagaaaatgcctcttgtctcgtttcagttttaggcgtacattaacgccgtcttgagcagtttagctcagaattctggggtgatgcccacggtaaaatacagggcttttaaggtcgctttgcccggtgtcaactcactgtatcaggtgtaatgaagtcattcaggcgtaacagtaattacgcggagagatgtaaagtgaaatatttctttatgggcatttcttttatggtcatcgtttgggccggtacttttgccctgatgatctaaaagcaaactgtgcaatgaaaaacaggagccatcaggctcctgtttgcatttctgacgacggtgtttattccgcgttttcgtgaatatgtttgctgctggcgggtagtaaaccgtcggcacggaacatcgctttaatccctctgatggcctgacgaatacggtcgcggttttcaatcagtgcaaagcgaacatgcgtatcaccatagtcgccaaagccaatccccggcgagacacaaaccttcgcttcgttaaggagcttcttggcaaattccagcgatcccatggccgcatatggttccgggattttcgcccagacatacatcgaagccttcggcatttcgaccatccagcccgcttcatgcagccctttaaccaatacatcacggcggcgtttgtactgttcggtaatgtcgcgcacgcactgttgatcgccctcgagtgccgcaatcgccgccacctgcaacggcgtaaaagtgccgtaatcgtgatagcttttgattcgcgccagggcactgaccagcgttttgttgccgaccataaagccgatacgccagcccgccatgttgtagcttttcgacagcgtaaagaactcgaccgccacatcgcgtgcacccggcacctgcataattgacggcgctttccagccatcgtagacgatatcggcataggccaggtcatggaccaccagcacatcgtagcgtttcgccagcgccacaaccttttcgaagaactccagttccacgcattgcgcggttgggttcgacgggaagccgaggatcatcatcttcggtttcggataactttcacgaatggcgcgctccagttcgttgaagaaatcgacaccttccaccagcggcactgagcgtacctgcgccccggcaatcaccgcgccataaatatggatcgggtaacttggattcggcaccagcaccgtgtcaccatgatccagcgtcgccagcatcagatgcgccaggccctctttcgaaccaatagtgacgatggcttctgattccgggtcgatttcaacgtcgtagcgatcctgataccagcgggaaatggcgcgacgtaaccgcggaatgccgcgtgaagtggagtaaccatgcgtgtccgggcgctgggccacagtacataatttttcgacgatatgcggcggagtcgcaccgtccgggttacccatgctgaaatcgataatatcttcgccgcgccgacgcgcagccattttcagttcagcggtgatgttaaaaacgtagggcgggagacgatcaatgcgcgtaaagcgacgttcagggcgagtgtcagccataatttcctcagattaacgttagcgcccggaccgtccgagcgacgctgccacaatggtggctgttttgaaaatagcctgattaatttctgtctgtccagcgttttagaacatttttatcaatggctttaaatgaggaactccacttcaaaaacaggaaatttttctacgctaacaagaaaattaccaccaattttattaacattataatttcaataaatttaccagccagaagtgcattatcaagagatacattgctaatacaccatttatctttcaatccccttttaaatttatggtttttcctcaaaaacggcctgctggtcatcagccttcaggttacctatcatagaggtttaatccttattcagagtcacccgtgcacgaaatattcaacatgctgctggcggtcttcgatcgggcagcgttaatgcttatctgcctgttctttctcatccgtatccgcctgtttcgcgaactgttgcacaagtcggcgcactccccaaaagaattgctcgccgttaccgccattttctcgctgttcgccctgttcagcacctggtccggcgttcccgtagaaggctcgctggtgaacgtacgtattatcgcggtgatgtccgacgggattctgtttggcccgtgggtaggcatcattaccggcgtgattgcgggtattcaccggtatttaattgatatcggcggcgtgacggcgatcccctgctttatcaccagcattctggcgggttgtatatcaggctggataaacctgaaaatccccaaagcacagcgctggcgcgtcggtattctcggcggcatgttgtgtgagacgttgaccatgattctggtaattgtctgggcaccaactaccgcgttggggatcgatatcgtctctaaaatcggcattccaatgatcctcggtagcgtctgtatcggctttattgtgcttctggtgcaaagcgttgagggcgaaaaagaggccagcgccgcgcggcaggccaagctggcgctggatatcgccaacaaaacgctaccgctgtttcgccatgtcaatagcgagtcattacgcaaggtctgcgaaattatccgcgatgacattcacgccgatgcggtggcgattactaataccgatcatgtgctggcctatgttggcgtgggtgaacataactatcagaatggcgatgacttcattagcccgactacccgtcaggcgatgaattacggaaaaatcatcattaaaaacaatgatgaagcccaccgcacaccagagattcattccatgctggtgatcccattgtgggagaaaggggtcgtgaccggaacgctgaaaatttactactgccacgcgcatcagatcacctcgtcattacaggaaatggcggtcggtctgtcgcaaatcatctccacgcaactggaggtttcacgcgccgagcagctacgtgaaatggcaaataaggcagagcttcgcgccctgcaaagcaaaattaatccccattttctgtttaacgctctgaacgctatttcatcgtcaatccgtctgaatccggataccgctcgccagttgatctttaatctgtcgcgttatctgcgctataacattgaattaaaagacgatgagcaaatcgatatcaaaaaagagctgtatcaaattaaagactatattgccattgagcaggcccgctttggtgacaagctgacggttatctatgatattgatgaagaggtgaattgctgcattcccagcctgctgatccagccgttggtggagaacgccattgtccacggtattcagccttgcaaaggtaaaggcgttgtcaccatcagcgttgcagagtgcggaaatcgggtacgcattgcggtgcgagataccgggcacggcatcgatccaaaggtgattgagcgggtcgaagcgaatgaaatgccgggcaataaaattggcctgctgaatgtccatcatcgcgtgaagttattgtatggcgaggggctgcatatccgccgcctggagccggggacggaaattgcgttttacattcctaaccaacgcaccccagtcgcctcacaggctacgttattgctttgagccggagtgatattgtgaaagtcatcattgttgaagacgaattcctggcacaacaggaactgagctggctaattaaagagcacagccagatggagattgtcggcacctttgacgacggtctggacgtgttgaagtttttgcagcataaccgcgtcgacgccatttttctggatatcaatattccgtcgctggatggcgtgttgctggcgcaaaacatcagccagttcgcccataaaccgtttattgtgttcatcaccgcgtggaaagaacatgcggtagaagcgtttgaactggaggcgtttgactacattctcaaaccgtatcaggagtcacgtattaccgggatgctgcaaaaactggaagcggcctggcaacaacagcagaccagcagtacgcctgccgcgacggtaacgcgtgagaatgacaccattaatctggtgaaagatgagcgaataatcgtcacgccaattaacgatatctattacgccgaagcgcacgagaaaatgacctttgtctatacgcggcgtgaatcctacgtaatgccgatgaacattaccgaattttgcagcaaactgccgccgtcgcattttttccgctgccatcgctcattttgtgtcaatctgaacaaaatacgcgaaatcgaaccgtggtttaataacacctacattctgcgactgaaagatctggattttgaagtgccggtcagccgcagcaaagtgaaagaatttcgccagttaatgcatctttaatcgggaactttcatgaaagcaccaggcttgcccgccgatcaacaatttttcgccgatctgttcagcggcctggtgcttaacccgcaactactggggcgcgtctggtttgccagccagcctgcctcgttaccggtgggcagtttatgtattgattttccccgtctggatatcgtgctgcgcggcgaatacggcaacctgctggaagcaaagcagcagcgaatggtggaaggagaaatgctgtttattccggcacgcgcggctaatttaccgatcaacaacaaaccggtgatgctgttaagcctggtgttcgcaccgacctggcttgggttatcgttttacgatagccgcaccacgtcgttgttgcatcctgctcgccagatccagcttcccagcctgcaacgcggtgaaggtgaagcgatgcttaccgccctcacccatcttagccgttcgccgctggagcagaatatcattcagccactggtgttaagtttgctgcatctttgccgcaacgtggtgaatatgccgccgggtaattcgcaaccgcgcggcgattttctctatcacagcatttgtaactgggttcaggataattatgcccagccgctcacccgcgagagcgtggcgcagttttttaatatcacgcccaatcatctgtcaaaactgtttgctcagcatggaacgatgcgttttatcgagtatgtgcgttgggtgcgaatggcgaaggcgaggatgattttgcagaaatatcatctgtcaattcatgaagtggcacagcgttgcggttttccggatagcgactatttttgtcgcgttttccggcgtcagtttggtctgacgccgggagagtacagcgcccgttttcagggctaacgtcagaaggttaattctgtttccagcagcgtcaggatactttgtgcatcttgcgcggcaaacaacgactggcggaagtttttattcaccagtttacgcgccagctgcgagaagactttcacatgattcatcccttcgttagcacccagcgtcagcatgatcaccagttcaacttcgcccatttctgactgccagtcaaccggtttcgccagccgggcaatgctgatactggaatgacggatccactgagatttggtgtgcgggatcgctacgccaaaaccaacgccggtggtaacaatctcttcccgctgccagacatcttcttccagctcaaacggatgttcagtgcgcccgttaacgccgaggttgccgcacaggaactggatcgcctgctctttattgctaaaatcctgatcaacaaagatattctccagcgccagcagtgggcgaacgtcttcttccggcgtaaaggcggtgagtaacgcttcaatttcctgcgcactgcggcattcacatgcctgacgcgccagttcccgacacgcctcgctatccagttgacgaagctggcttttcaccgccggaatacgcgggctactcatactcagctcatccaggcccagcccaagcagtagcggcagataacggctttcaccgcccagttcaccgcaaatgcctacccatttgccccgctgatgcgcagtggtaactatttgctgcaacatgcgcaggaacgatggcgtaatcgggttatatagcggcgatacgcgcgggttattacgatcgaccgcatacagatactgggtcatatcgttggagccgatactgaagaaatcgacctcatcggagaagtggtcgatgatgtagcacaccgacggcacttccaccatgatcccaagcgtaatcgtctctgcatgacgcaggccatcgcgcttaagctcaacgatcgctttttggatctcgcctttcacccataagatctgatcgaggctgtgaaccatcgggatcatcaactgggcgttgccgaaactggcggcgcgcaaaatggcccgcagttgagtgcggaacaggccagcaaattccgggtaaatacgtaccgcgcgatagccgaggaacgggttctcttcctggggaatattcagataaggaatgcttttatcgccgccgatgtccatcgtgcggaagataatcggcttgtcgcccgccgccagtagcacctgctggtaggcttcaaattgctcctgctcgtccggcgcgctgtcgcgatccatatagagcatttcggtacggaacagcccgacaccttccgcgccgttggcaaacgcgcctggcgcttccagagcggtgccgatattcgccgcaatatcaatacgcttgttatcacgggaataggccagctgcgcggcagcctgcgcctgttgtttttggcgtttatccgccagcgtctgcgcgacctgataataaccgctcaccgcgtcattcgggttaatcgccagcacgccgcactgggcgtcaagcactgcaggttgcccggcataacgggcaatcgcatccagcggcaagccactcagtaccgggatcgccgaggcacgggccagaatcagtgtatgcgaggtgcgcccggttttctccagaatcatgcccgcaagatttttcaaatcaaggctcaaaaactggcttggggttaaatcttcagccaccagaatggtcggtttttccagcaccagattgttgcgcggcttcagttccggctaggtgatatgcagcaactgttcgctgatatcgcgaatgtcgctgacccgctcgcgcagataatcgctggcagaagcagatagtttggcgcaaacctgctccatattgctgatgatcgccgcccccagtccctgatgctgttctgtcatcaggcgacggatattgcctgcaaattcatcatcctgaatcagcgacaaatgagcgctgaggatagttttgctttcgccgtcacgctcacgcaattgctggttcagttgctcggcaagcgttgccaggctgtgctccagccgggtggaatcttgcgcactggcggggattgcccgataactgtcgaggctgtcgctttgtaacagggtcagcgtacccacgccgacgccgcttgccagcacattgccgtacagtaaatccgggttaaggcggcttaatgaacgcggcagcggatgcgccgtcagttctgcctgcgtcggctgaacgctgtcgctgtcgataaagcgcaccaggatgtactcttccagcacgcgccgcgcctgctcttcatcgctgccgctaatgttcaggctgcaactgtcattaaataaggtgccagttccaatcaacgccagcgagcttttagcatcggcctttgcgttctggcgatggttgataaaggtgatttcgctttgccactggctgcactgttctttaagttcccacgccggacgagcatgtagaccgttaggcaaaggacagagaaattgaatcgttaacataaccgctccgggttaatcaggagatcatctgaaatccgtcagttgaacaaccgtctcacgcgtaagacgttgaataagggcagataaaagttgctccatctgcaaaatgtcgcggcaatcggcaatcgatgccgcgcaatgtccgtggcgggtggcaggccccattaccactgtgggtacgccagtatcggttaagtgcaccgctccaccgtccgtgccgccgttactgaacatatccgcctgcaacggaacgccaatttctgccgacacggtttcaatccacgcggtaagttttggcggcgcaatcagcgatttatcgcttaacaccagcatcggcccgttaccaatctgacgatggttagccgcgccataatcaaagtttttcgcccagcaggcggtatcaagcacaatggcgacgtccggcgacaccgcgcgggtagcagtttgcccgccgcgtaatcccacctcttcgctggaacttgccaccagccacacttccgcaggcagttcggcgtcgtgcagctcacgtagtaacgtcaccagcagatagcaaccgaggcggtcatcaaaggctttccccatcacccgctggtgagggagaacctgaaaagttgtatcaaaggtgacgcgatcgcctggacgaattcccgcctgcatcacttcgtcatacgagcgcgcaccaatgtccacgcgcatggcgctgacgtcattcccctgccggtcgccgtcaagcaggcctggaattttgcactcttcacgggtggtgatgcgcaccggctgcagctggcgggcagccatgcgcacgttgccaaccggcagcacatcaattgccccttcgcgggagatgctgcgcaccataaatcccacttcgtccatatgcgcacagatcatcaccttcggacctgtcgattcattgaggcggatcagcaccgatcccagaccatcaaatcgtacttctttttgcaggcgatccgcttcttccagtaggatctgccgcacttcctgttccgaggaggcgatcgcatctgcctcgctcaacgcttttaatagcgataaatccattatgcctctcccgtgagcaacactgttttcggcatggcgtagagcacttctgcgccttgcggggtaaccagcacaacatcttcgatgcgcacgcccccttgccctggcaaataaatccccggctccacggtcagtaacatgcctggctgtagcgtcgtggtatcccgcggtgaaaagcgtggatcttcgtgtacttcaataccgatagcatgaccggtgttgtgaccaaaatagtcgccaaatcctgcctcggtaatcacccggcgcgcggcgtcgtcaacctgttagcagcgtacgccagggcgaatcgcggagattgccgccagctgtgcttgcaggacaatctgatagacgttaaacagcgggtgagattcggcaattaccccttcgccattcaccagcaaggtgcgcgtcatatcagagcagtacccctgatagagcgcaccaaaatcaagagtgacaaactcgcctgctgcaacaatcttgtcgctggctttgccgtgcggcagcgccccacgccagccgctggcgacaatggtgtcaaaagaggctttttctgcgccctgctggcgcataaaccactccagttcagcggctatctcgcgctcgctcatccccgcctgaataaagcggcgaatatgctccgctccgcgatcggcaatcccacaggcgaggcggattatctccacctcctctggcgttttgatttgccgcagcacatccggcgtggcgctaaccagtttcgcattgagttcagacttccagcggtgcgcggtttcccaactcacctgctggccttcaaaaccgagcgtttgcaactgctcatcggcaatgatttgattgacgatagtggtaagcgtgttcgtcgcgtcaagcaaatgcagctggtagccttgcgcacgggcttccacctcaacgaaatagcgcgaatctaccagaatgtgcgcactttcacggctaataaccacatagcctgatccggtggagatccccagatgcggctgtttgttctgccgtgaggagagaagcactgcatccagttgttgcgccttaagccagtcgcgcagcgaagcgagtaatgtcatctggattttccttcttacaggctatcgattaacaatttacctttacggaacatcatcagacgcaggaacaccaccatcagcgcagttatgactgcccccagcgcgatccccgccatatagacgcccaggttagtgaccagcggccatgcccagatagcggattccgggaaccattgcactgcgcccagccagacagcggcggttgagccgacaatcgcgccgaccatatacgacggaatggcggtgatggggctttccagcgcaaacggaatcgcaccctcactaatccccataaaggcaaggaacatcgcggtcttaccctgcggataaagttgagcgttgaacaggcgtttgccggttaaacgacggtcgataatggtcgccagacccagacctatcggcggaataacgatagcgatagaacgtgcagtgaccggtaatacgtggtcagtggtaaagctgaaggcaacaaaacctgcggctttgttgatcgggccaccaaggtcgattgcggtcgccgcggcgatccccattgcgtacatcagcgcgcccttctcacctgcggcagtcagcacggtacggataccgccgttgatccagccgccaaagggggtaatgacgtagtacatcgccagcatgacaaaaatggcggaaagaatcggtagcaaaaatgtggttttgaacgctaacaggaaatccggtaactggattttctggttcatccacttcacaaggtaacccgcgacgatagaaataatcagcgcaccaatgaaggtggacggcaccggcgaagaggtcgcccattgcatagtgctgggatcgaagttcagcagttgcgtcggctgggtagacatcaagccgccgataaaaccagccgggaacgccagtttgccaccgatagagttcgccacaaaagcagcaaacatcggaatggcaaaaccaaacaacacgccgccgaaggactgcgacagccaggcaaatttcagtaaggagaggtcgaaaccggagaatttcccgctattaagagcatccatgatgccgatctcagcaggaattttaagccagctataagcaatcagctggctgaaagcgaggatcacaccgcccataattaaggtcggcaccatgcgtgaaatccctaacatcacatgctgcgggagttcaccccagaagctgcttttagaggcctgcggattcttaactgccgctgccgcaccggatgcgccaggcacaacggttgcactgcgttttttaatggccataacaattatccctgtcgaatattactgttgttcagaggcaatcatctcttcgatttctttgatgatgcccgcagcgtttttaattgcgtcctgcaaagtgatttcataaacgtcgcgtgattcgaaacgctcattatcttccggggtaactgccacggagtggatgatgatggttgcttcggcgatatcctgcgccgtcaggcgattctggataccgtccgcgccctgggtttcaattttcacttcataacctgcttctaccgccgcttcttccagcgcctgagcggccataaaggtgtgagccaggcccattgggcaggcacataaggcaattagtttcttactcatcgttaattcctcgttcagtgatagttgacgagtgaaattatgaacgtgcaaaacaaatcgccgttaccagacaaataatgcatttactggagaattaatcccgctgtacggaagtgtgacgcaggtcggccttgtgagggggacacaaagaaaaattgaattaactgtatgatttaaaagattatcgggagagttacctcccgatataacagaaaggatttacagaatgtgccctaaggtctggcgtaaatgtgcaccggaaccgagaagacccggattgtcatggacgatgagatacaccggaatatcatggacatattctttaaagcgccctttatcttcaaatgcggcacggaaaccagaggctttgaagaactcaaggaagcgcggcacgataccgccagcaatataaaccccaccaaaggttcccagcgttaatgccagattgccgccaaaacggcccataatgacgcaaaacagcgacaacgcacggcggcaatcggtgcagctgtcagccagcgcgcgttcggtaatatcttttggcttgagattttctggcaggcggttgtcggctttaacaattgcgcgatacaaattcaccagcccaggaccagaaagcacgcgttccgccgaaacatgaccaatttccgcacgcaatatttcgaggataatggcctcttcttcactattcggcgcaaaatcaacgtgaccgccttcgcccggcaagcttacccaacgcttatcgacatggaccagatgcgcaaccccaagccctgttccggcaccgtaaaccgcaataggtttaccttcgaccggttctgcgccaccaaactgaatcagatgctcttttttcagcatcgggatcgccatcgatacagcggtaaaatcgttaataatttccagatggctaaaaccgagattctttttcatttcggcaattgagaacgcccaggtatggttggtcattgccacccagtcaccggtaattgggcaagcgatggcaatacagccgtctttcacctcgaccttatgttcttcaagataaacgcgaatgaccgcttcgaggctggggtaatcaagccctgaataggtcttagcctgcgagatttcaccactggcaatatcacacagagcaagacgtgcgttggtgccgcccacatcaccgactaatgcatactttgtcattcttcaactgctccgctaaagtcaaaataattctttctcacactgtaaatacctgggggcataacaacaacgccggaaaggcaggctccctgtaaatatcgatctgggtcacacatttactttatcgtttcagcaccaattgcagcgatgcctttttgcaagctgggcaaactaagtatctgaccccgcataaggaatagaacatgctccatccgcgagccagaaccatgttgttattatcgctccccgccgtggcaattgggattgcgtccagtcttattctgattgtggtgatgaaaatcgcctcggtattacagaatttgctctggcaacgactgccgggaactctggggatagcccaggattcacctatctggatcatcggtgtattaacgctaacgggtattgcggtggggttggttatccgtttcagccagggtcatgccggaccagaccccgcctgtgaaccgctgatcggcgcaccagttccgccctctgcgctaccaggacttatcgtagcattaattctcggtcttgctggcggcgtcagcctggggccggaacatccgatcatgaccgtcaatatcgcccttgccgtcgccattggcgctcgtctgttaccgcgcgtcaaccgaatggagtggactattttagcctctgccggaaccatcggcgcgctgtttggtacacctgttgcggcggcgttgatattttcgcaaaccttaaatggcagtagtgaagttccgctatgggatcgtctttttgcgccgttaatggcggcagcagctggtgcacttactaccggattatttttccatccccatttttcactgcccattgcgcattacggacagatggaaatgaccgatattctcagcggtgcaattgtcgcggcgattgccatcgcagcagggatggtcgccgtatggtgcttaccacggttgcacgcgatgatgaatcaaatgaaaaatccggtgctcgtgctgggtattggcggatttattctcggaattctgggggttattggtggaccagtttcgctgtttaaagggctggatgagatgcagcagatggtggcaaatcaggctttcagcaccagcgattactttttgctggcggtaattaaacttgccgccctggtcgttgctgccgccagtggctttcgcggtgggcgaatcttcccggcagtgtttgtcggcgtggcattagggttgatgctgcatgagcacgttcccgccgttccagcggcaataaccgtttcctgcgctattctcggcatcgtgctggtggtaacacgcgatggctggttaagtctttttatggcggcagtcgttgtacccaataccacattgctaccgctgctctgtatcgtcatgcttccggcatggctgttattagcaggtaagccgatgatgatggtcaatcgtccgaagcaacagccaccccacgataatgtttagcaaaaaatgctctcctttatgatttaagagttatggcgatgatacggggctttacctccccgtaatattgcgttaacaggccgctgacggcttcgatcgtgaaggagaataacaatgttcaggtcactgtttctggcggccgccctgatggcatttaccccgcttgcagcaaatgcaggtgaaatcaccctactgccatcgatcaaattacaaattggcgatcgcgatcattacggtaattactgggacggtggtcactggcgagatcgtgattactggcatcgcaattatgaatggcgcaaaaaccgctggtggcgtcatgataatggctatcatcgtggctgggataagcgtaaagcatatgagcgtggctatcgtgaaggctggcgcgatcgtgacgatcatcgcggaaaaggccgcggacatgggcaccgccattaaacgcgtcctccaatggagcacaatgcctgatgcgacgctagcgcgtcttatcaggcctacaaaccggctctttaacgcgtagggcggataaggcgtttacgccgcatccgccaatagtgccagatgcgacgctcattcaactacaatcccagcgccgtccccaccaacaaccagatattcagcgccacgaccagcactacaatcacccagcctgtctgttttacgcgtttgctgttcaccagatcgcccatcaacttgctgtcactggtgaaaatcagcagtggaaccagcgccagggcgataccaaaacttaacagcacctgactcataaccagaatccgtgtcggatctaatcccatcagaatgacaataaatgacggcaacatggtgactgtacgacgcacccacagcgggatatggaagcgaatgaatccctgcatcaccacctgccccgccagtgtccccaccaccgttgaggacagtccggcagcaaccagacttaacccaaagaccgttgccgcagcatggcttaacagcggttgcagcgtcagataagcctcatcaagatcggcaacaccagtatgaccagaaaagtggaacgccgccgcagctgtagccatcatcgccagattgacaaaaccggcaatcgtcatggcgatagccacatcccatttggtggcggaataacgttgttgacgcgaaccgccatgtaaatgctgagtgagcgaagagtgcaaataaatcacatgcggcataatcgtcgcccctaacacgcctgctgccaggaagaccgcctccgaagtaggtaaactcgggatcaccattcctttacccagctgcgccaggttaggctgggagaaaatcaactcgacaatgtaagccgcggcaacaaacaacagtaacccgccaatcactttctccagtggtttttgcccgcgacgttgcagcattaaaatcaggaaagtcgcgatccccgtcagcaccgcgccctgcaacaacgagacaccaagaatgagtttaaaaccgatcgccgcaccaataaattccgccaggtcggttgccatcgcaataatttctgcctgaacccaatagaaccacactacgggacgcggatagtgatcacgaatctgctccgccagattttttccggtggcaatccctagtttggcagagaggatctgaatcagcatcgccatcaggttggcccaaacgacaacccacagtagctgatagccgaagctggcacccgcctgaatattggtcgcaaagttaccgggatcgatataaccaatcgccgcaatgaacgcaggtcccattaatgcgagcctcatcttgcgcgccgcccgtccgctgctactctcaacgcgatagttcgtcatcttgtgcctctaaaacatagcctttgctatgtttcatgctatgataaacgagaatgattatcaaattcatttaaatggattgtggtgatttctctgatagaccaggattatgactacgaaaagattgatgacttgaatgttatggttatgtttaatgttagcacatttacataactttcagcttccatacacaacatagcagaaatgtatgacagatcactatttttgaagcctgtcacaggacgtcattatagtgtgtgtcagatctcgttttccttaaccatgttacatagaatgtgcacggaaatttaacctgcctcatatttggagcaaatatggaccgcgtccttcattttgtactggcacttgccgttgttgcgattctcgcactgctggtaagcagcgaccgcaaaaaaattcgtatccgttatgttattcaactgcttgttatcgaagtgttactggcgtggttcttcctgaactccgacgttggtttaggcttcgtgaaaggcttctccgaaatgttcgaaaaactgctcagatttgccaacgaagggactaacttcgtctttggtagcatgaatgatcaaggcctggcattcttcttcctgaaagtgctgtgcccaatcgtctttatctctgcactgatcggtattctccagcacattcgcgtgttgccggtgattatccgcgcaattggtttcctgctctccaaagtcaacggtatgggcaaactggaatcctttaacgccgtcagctccctgattctgggtcagtctgaaaactttattgcctataaagatatcctcggcaaaatctcccgtaatcgtatgtacaccatggctgccacggcaatgtccaccgtgtcgatgtccatcgttggtgcatacatgaccatgctggaaccgaaatacgtcgttgctgcgctggtactgaacatgttcagcacctttatcgtgctgtcgctgatcaatccttaccgtgttgatgccagtgaagaaaacatccagatgtccaacctgcacgaaggtcagagcttcttcgaaatgctgggtgaatacattctggcaggtttcaaagttgccattatcgttgccgcgatgctgatcggctttatcgccctgatcgccgcgctgaacgcactgtttgccaccgttactggctggtttggctacagcatctccttccagggcatcctgggctacatcttctatccgattgcatgggtgatgggtgttccttccagtgaagcactgcaagtgggcagtatcatggcgaccaaactggtttccaacgagttcgttgcgatgatggatctgcagaaaattgcttccacgctctctccgcgtgctgaaggcatcatctctgtgttcctggtttccttcgctaacttctcttcaatcgggattatcgcaggtgcagttaaaggcctgaatgaagagcaaggtaacgtggtttctcgcttcggtctgaaactggtttacggctctaccctggtgagtgtgctgtctgcgtcaatcgcagcactggtgctgtaaaaccatacataaaaaagccggggatcattccccggcttttttacgcctgttaatcagctaatggctgcgggcgaccaatcaaatacccttgcagatattgcaccccgagcttatgcaatagcgcctgctgctgttgcgtctcgacaaactccgcgaccacactcaatgacttcgctttcgccagatcggtaattgatctcacaatcatcgcatccagcgtattcgtgacaatatctttcacaaagacgccatcaattttgatgatatcagcctgcaaacgctttaaccgttcgtagttggcatatccggtgccaaagtcatcaatcgcaatccggaaaccaaacttatgcagctgctcgatgttgtacatgctgctttctgcgttagaaaacgcctgctcctcggtgatctcaagaatgaccgcctgcggggagatgtgataacgcttaaacagacgaataatccgcccggcaatattcttttgcagcagcgtgagcggcattaaattgactgaaaagcgcggtccttttttgtcgcaagggtgtgttgccagccacttcaacaaggattccagcacttgcaaatcaaaacgcgcgctaaggttaaactgagcaataaggggcagaaacttatccggggtcataatgccgccgtcatatttcagtcgcgcgaggatctcatcataaccttcaccctctttgttgcgaattggctgggcgtagagcagcaaatcaccctgatctaacgccgtgcgaatggtattcagcaatagcacctgtttagtggtctgcccggaaaccatctcctctctgctatccagcgccagcacatgatgatgtgcgcaggattgctccgccagccagcttaactgccccaacaagggttgcagggtttcctgatttccatcaaaacgcccccaggcagcaccatagcccatatccagcccggtattgttccagtgaatttgccgactattcaggatgttaaccatatgctggagtcgcccttccgtttccggcccgctcagcactaacagcagttcactacccggcaattgatataacttttcgttttcctgcatcaacggcagcagcgtacggtaaattgatcggatacagtgaacgcgcatcattaagccgtaatgacgactcataaactcaagattatcaatgcgcaggcagcaaaactcttgcccgcctcttgctccggcgcttgttccaacgcacggaagttgggcaggagcgttaacggatcggtcagcgcctgcaaatgccagcggcgattaagccattcactgcgatgataaatgcgcaccatatagagcaggcaaacgctaaaggaaatcagcaccgcaagaataaatgccagcgaatattcggtttccaccccttgcaaaaagttctggttgtaattcagaaggcaaagcgttgaaacagcccaggtgagatttaaaaacggatagcgaagcttaccgaccccgagggtaaagatgatgaagaaaacgggtaccaggtaaccggcaataaagtcgttttcataaggtgtgcacaacagaagtagaagcacgcttaacgctgccagccagcttaaggtaaatgcgcgtttctctttgcccaacgacggcgcgatatccctgcgccacaatatctgcgcaaagtggggacttacaatcatgcgagtgagatagtagaaaagcatgttgtaaataagcacagcggtgaaaaggcttagcaaatcaacgaccgtgaaaatggcatccgcatcgccgaaaaaggtggatatctttagcgggaaatcaaagaagctccccacaagatacatgctgcatttgatgccgatcggcgtcaccaaaccaagccagaacagacgttgccagacatatcggctggtcaatccataacgccaacgcgtccccagctgccagcgtaatattgcgcaggcacacaacacgacaaacgtctggctaccgagcatgaccgcagtctgtaaaaaagagagatgaaagttccacagattggtgcaaaacatcccgcataaaacgggaacgacaccgcgccagccaaagataaacaagattgacagcattacgcacagtggcatccacgccagaaagatataactggaatggataatggcaagtggcgaaataaaacgggatagctgaataagtaccacggtgagcgtaaacgctagtgtgaatatcttgatattttttatcaggttatgctccacaaacatgagtacactactctcactgatcggggttttcaggcacacaaataataagtttattcgcatcgcgaagcaaacagggggccagcctgttgccgatttttcatccaatgatgctttcaccaggcggcactaacccggacgtagactgtattacaaaagcggcaaaaagcagagacaaaaaacccccgctttgcagcgagggttggaaatttggtggagctaagcgggatcgaaccgctgacctcttgcatgccatgcaagcgctctcccagctgagctatagccccacgatgcgtttacgtaccaaatttgctgggtgcaaaatttggtggagctaagcgggatcgaaccgctgacctcttgcatgccatgcaagcgctctcccagctgagctatagccccgtcacgtaaagcttgtcgagttgacgggcggcatcatatgaattccgcccgaatgtgtcaacggcaaattgcaacgtgtagtttcaatcgctgaaaaatcaggcaaatgaacaattttggaaaaccgctcgcattcagtagttattcatgtcacggtttcctgtaaagtggtgttataaaatgaactactaatagacccacatacattcagggaattgttatgttcaaggagaggatgacaccagatgaacttgccagactgaccggctatagccgccagaccattaataaatgggtacgcaaggagggctggacaacgtcaccaaaacctggcgtccagggtggcaaagcccgactggttcacgtcaatgaacaggttcgtgaatatattcgcaatgctgaacgtccagaaggtcagggagaagcgcctgccctttctggtgatgcgccgcttgaagtattgctggtgacactggcgaaagagatgacgccagttgaacaaaaacagtttacatccttgcttctgcgggaagggattatcggattgttacaacgcttagggattcgcgatagcaaataatatgaaaagattacgcaataaaatgaccaccgaagaactggctgaatgcctcggtgtggctaaacaaactgttaaccgttggatcagagaaaaaggctggaaaacggaaaaatttcccggcgtgaaaggcggtcgtgccagacttattctggtcgatacgcaagtttgcgagtttattcagaacacgccagccttccataacacaccaatgttgatggaagctgaagagagaattgctgaatacgctcctggagcacgcgccccggcgtatcgacaaatcatcaacgcgatagataatatgacagacattgagcagggaaaagtcgcgcaatttttgtcacgtgaaggaattcgcaatttcctcgcccgtctcgatattgacgaatcagcataaataaaaaacggcaggatattatctcctgccgtttatctttttacacgctaattactgctgattttcgcgttcagcaataaaatccagcgctttgttgatacgctcgatactgcgggtcttaccaattgcgtgaacggtaacatccagtgctggagaccgccccgccccggttacggcgacacgcagcggcataccaactttacccatacccacttccagctcatccgccgtcgcctgaatagcgtgatgaacgttttcagcggtccagtcagtaatcgcggccagtttgtcacgaaccacttccagcggctgacgcgctaccggacgcagatgttttttcgccgcatcggcatcgaactcagcaaaatcttcgtagaaataacggcagctctgtgccatctctttcagcgtcttgcagcgttcgcccagcagtttcaccagatcagccagctgcgggccgttacgggtatcgatattttcctgctcaatgtgccactgtaagtgagtagcaacatactccggcggcagcgcgttaatgtagtgatggttcagccacagcagcttgtcggtgttgaacgcactggcagatttgctgacggcattcaaagtgaagtatttgatcatctcttcacgagtgaagatttcctgatcgccgtgggaccagcccagacgcaccagatagttcagcagtgcttctggcaaataaccgtcatcacgatactgcattacgctgactgccccgtgacgtttggacagttttttaccgtcatcgccattgatcatagaaacgtgcgcgtaaaccggcaccggcgctttcagggccttaagaatgttgatctggcgcggcgtgttgttgatatggtcttcgccacggataacgtgggtgatttccatatcccagtcatcgacaaccacacagaagttataggttggggaaccatcggtacggcggataataagatcgtccagttcctggttgctgaactcgatcggaccacggatctgatcgtcaaaaacaacagaaccttcctgcgggttagcaaaacgtacaacacacggttcatcatcagcatgatgctcatggctgtggcggcagcgaccgtcataacgcggcttctcacctttcgccatttgctcttcgcgcagcgcttccaggcgctctttagagcaatagcatttataagcagtgccctcttccagcatctgatcgatcaccgcgttgtagcgatcaaaacgtttggtctggtagtacggaccttcatcccactccaggctcagccagttcatgccatccataatggcttcgatagcttccggcgtggaacgctcaagatcggtgtcttcaatacgcagcacgaactcaccgccgtggttacgtgcaaaaagccaggagtaaagagcagtacgcgcgccgccaacgtgcagatagcctgttgggcttggcgcgaagcgagttttgattttcatgaaatggccttacgtttagaaagatgccgacaaccggcaaatcctggaaaaattgagtgggcgatattctatcactcccgcctgattcctcaatgtagttcgggtttctaccttacgcattattgttttcgttgacaaattgcgcaacacggtctgttttgcgatcatcttgcttaaatttacgacgaacgaacaatttctttagaaaatgcgttgactcattttgaactctccctataatgcggctccacacagcgggggtgattagctcagctgggagagcacctcccttacaaggagggggtcggcggttcgatcccgtcatcacccaccaactactttatgtagtctccgccgtgtagcaagaaattgagaagtgggtgattagctcagctgggagagcacctcccttacaaggagggggtcggcggttcgatcccgtcatcacccaccaatttctcgccagctaaatttcttgtaaaaatgtgaagtaccgaagtgggtgattagctcagctgggagagcacctcccttacaaggagggggtcggcggttcgatcccgtcatcacccaccacttcgggtcgttagctcagttggtagagcagttgacttttaatcaattggtcgcaggttcgaatcctgcacgacccaccaatgtaaaaaagcgccctaaaggcgcttttttgctatctgcgatactcaaagattcgaacctgcagcaggtttgagttgagcgcagcgaaacaacggagccgctcgcggcgacggcccgaagggcgagcgaagcgagtcatcctgcacgacccaccaatgtaaaaaagcgccctaaaggcgcttttttgctatctgcgatttgtaagattgatttttcttctcaagttccttgttcttctgccgatattacctcgtacagtgacgaggactgaacaatggccactatctcttcaacttcaattccttccatacaaacacagagtagtaacagggcatcacaaggtagcgatgttgcttcaaaaatcgcgcggataagtcagcaaatcatcaaactcactcaacaaattaaagagattgtagacactagcggcagtgctgaagacaaacaaaaacaggccgaattgattcaacagcaaatcaccctactggaaacacaactggcgcagttgcagagacagcaggcagaaaaggcgcaggagaaagagcagcgtttgtctctgaatgtatcccttctaaatcctgttgaaaatacgactcatatcgatatctatatctgatacaacggagccccttcccaaccagccattagcgcattgccctggtctcgtaccacgtcccataacgcttcagcggcggtggaaagtgaacggttcttcctgcgcaccagcatcaactggcgttcaacaaccggcgtaatgcgctttaccaccagtgggctaccttcaggcaatggtagcgccagtgcgggaagaatactgatgccgatgcctgcggctaccatcgggaacagcgtcgccggatgtccaatctcctgcacaatattcgcctgaataccattgcgcgccagcgctgcgtcaatcagcggtcggctgcctgacgcgtaatcctgcaacaccaatttcgctccctgtaatgcctgccagggtacataatcttccacggccaaagcgctatcgcgatggcaaagcagaaagaaaggctcggaaagaatcgcttcacattgcagatcgcccactgggcctggatcgatgacgatgcaaaaatcgacatctccctggcgaatactttccatcacccactgctgcggacgatcgtgcaggacaaactgaatatctggatagcggcgatggctttcagcaatgcattgcggaataagatgcgcggaaatggtctggctggcagcgacccgaacttttccgctcagttgttgccccatacgcccggtatcgcgcaacgtgctgttaagttcatccagcagtcgctcaagacgcaaagccaactgctgccctgcatctgtaagcaccacttcacgcgtggttctgtccagcaggcgaacaccagtatgattttccagctccttcacactgtgacttactgccgactggctcaagccgatacgctctcctgcacgactaaaacttttctcctgcgctactgtgacgaaaacctttaattgttttaaagaataattcatctgttttcttcatgaatggatgcaataaatcaattttatttctcaaactggaagaagcacaatagaaccatcgatcatctggagtctttatgaaactttttcgtatcctcgatcctttcaccttaaccctgatcacggtggtgttgctggcctctttctttccggccagaggcgatttcgtccccttctttgaaaatctgaccaccgcagctattgccctgctgttctttatgcacggcgcgaagttgtcgcgtgaggcgattattgctggcggtggtcactggcgactgcatttgtgggtaatgtgcagcaccttcgtgctgtttccgattctgggtgtactgtttgcctggtggaaaccggtaaatgtcgacccgatgctctactccggttttctctacttgtgcattctcccggctaccgtgcagtctgcaatcgccttcacgtcaatggcgggcggtaacgtcgcggcggcggtttgttctgcgtcagcatccagcctgctggggattttcctttcaccattgctagttggtctggtgatgaatgttcacggtgcagggggcagccttgagcaggtcggtaaaattatgctgcaactgctgctgccgtttgtgttggggcatctttcccggccgtggattggtgactgggtgtcgcgcaataaaaaatggattgcgaaaactgaccagacgtccattctgttggtggtttatacagcgttcagcgaagccgtcgttaatggtatctggcataaagttggctggggatcattgctgtttatcgtggtggtcagctgcgttcttctggctatcgtgattgtagttaacgtctttatggcacgccgactgggcttcaataaggcagatgaaattactatcgtcttttgtggttcgaaaaagagtctggcaaatggcatcccgatggcaaacattctgttccccacatcggtgatcggtatgatggtgctgcccctgatgattttccatcagatccaattgatggtctgtgcggtgctggcgcgtcgatacaaacgccagaccgaacagttacaggcgcagcaggaaagcagcgccgataaagcttaaagcggacgcttcaggggctggaccagttgcgtcagcccctcggttttaatcagcagcgtgatttgcattagctcaccgagcttccctgccgggaactcatctttgcgggcaaaccacagcagatactcctccggcaggtcgattaagcgacgccctttgtatttgccaaacggcattatcgtattggctatttcaatcagctgctctttttccatctcagctacccagcaaacgcagcatttccgcttcgtcgatgacttcaatgcccagttcctgcgccttcgccagtttagatcctgcagcttcacccgctatcaccagatcggttttcttcgacacgctgcccgcgactttcgcgcccagttcgaccagtcgagctttagcgtcatcacgcgacatctggcttaagctgcccgtaagcaccacggttttaccagcaaacgggctgtcaatctcttccgcgttgataacgatcggcgcaggccagtgaacaccttccgccaacagctcgctgatgacattgcggttgctttcttcggcaaagaagttgtgaacgtgggatgcaacgacaatgccaacatcaggcaccttttgcagctcttcaatcgaagcggcttccagcacttccagcgtgccgaaatatgccgccagacctgctgcggtggcctcgccgacttcacggatgccaagtgcatagaggaagcgagcaaaggtggtttctttcgctttttccagcgcgttaaccacgttttgtgccgattttggccccatacgctccagtccggtcagtttgcctgcggtgagtttgaacagatctgccggagtgtggacatattctttttcaaccagctgatcgatgattttgtcgcccattccgtcaacatccatcgcacggcgggaaacaaagtgtttcagcgactctttacgctgcgcaccgcaaatcaggccaccggtacagcgggcaaccgcttcaccttccacacgctcaacgtcagaaccacataccggacaatgcgtcgggaatacaacctcacgggtatcttccgggcgttcagaaagcacgacgttaaccacctgcgggatcacgtcgccagcgcggcgaatcaccactttatcgccaatgcgtaaaccaagacgttcgatttcatccgcattgtgtaaggttgcgttactcaccagcacgccagcaacatggacaggttccagacgcgcaacaggcgtaatcgcgccagtacgcccaacctgaaactcgacgtcacgcacaaaggtcatctgctcctgcgccgggaatttaaacgctaccgcccagcgcggggcacgcgcgacaaagccaagctgctcctgctgttccagtgagttgaccttaatcaccacgccgtcgatatcaaagcccagcgtcgggcggtcttcttccactttgtgatagaacgccagcacttcttccgccgattcacaaagcgttacccgatcgctgaccggcaacccccactttttaaattgcagtaaacggccaagatgagtatccggcagctcgccaccttccagaacaccaacgccatagcagaaaaaagtgagcggtcgcttcgctgtaatacgcggatcaagctgacgcagtgaaccagctgccgcattacgtgggttagcaaaaactttcccgcccgtgcgtcgcgcatcttcgttaatcttttcgaaccccgcctgcggcaggaacacttcaccacgcacttccagacgcgccgggatattctctccgtgcagcttcagcggaatggcgcgaatagtacgcacattagacgtgatatcttccccggtggtgccatcgccacgggtcgcggcactgactaaaacgccattttcatacagaatactgacggcaaggccatccagcttcagctcacagcaccaggtgactttctcgttgtttttcagacggtcctgcacacgtttgttgaaagcaagaaagctttcttcatcaaaaacgttatccagtgacagcattggtacttcatggcgtatctggctgaaagccgccagcggcgcagcacctacacgttgggtaggcgaatcaggcgtaatcagttctggatgtttggtttccagctcgcgcagttcgcgcatcagcctgtcgtattcagcgtcgggaatttccggcgcatccatcacatgataaagatattcatgatggcgaagcgtcgttcgcagttctgtcagttgttgttcgattgattccatatcgcaccatcaatgctaaaaacccccgacaagcgggggttcgaagaggagttaatttgccttaagtgtatcaggcgttggcgtctttgacttcgcggatgatgtcctggtactcgcgcaatttctgcggagtcatcatacggcgctgatcgtcaagcacgacaccgcccacttcatcggcaatatgctgcgcagattgcagcatcagcttgaagttctgcagctcgtcaccgtaagacggtacctgcataaagatagtgacacccggagtagtgaaatccttcatttcaggatcaaaggttcccggtttcaccatattcgccaggctgaataacgccgggccgctgccatccgggctaagatgacgatggtaaatattcatatcgccaaaaatgaagcccgcttgttgaatgctgttaagaagcagttcaccgtttagctcgctaccgtgatgcgccgcgacgttcatgataatcaccgcttctttgcgcttcggtttatccataactggagccggttccgctacaggctcaggctgtggtgccgctacgggttctgcaggctggaaagcctgttgtgccggttgcggtgctgaatgcacaggctgcggcgctggcgcgacctgtggcgaaactggctgctgcaacggctgttcaggctgcggctgataggcaggctgctgcatcggctgcgctggacgcggagcatgttgcggcggtacctgcgcttcaggcggctgctggatcggttgacgcggctgcgcagacgcataaggcggttggtactggtgttgcggcgacggacgagcagcctcatgctcctgagcgttagccggggcatgattcacgcggtgaacacgaacctcaccaacgccctcatcatcttcgacatcctcgtcataagaatcgtcgtcacgttttgacttcattcgttttaatggccgatcgcggaacatagaagatcgttctttacggctggtccagaaaccatgtaccagtaaagcgattatggcgatcgcgccaacaatgattaatatcagacgcaaatcctgcatcattatattctctgttgttctaacaccttgccaccacggcaaacatttactcactaagagtatttgccgattacctcaagtgcaagtgcactattaactttcacagcacaaagatagatgaaatcgtgctttttgctgttttttcgaacatatcctaactgtccattgcgcaattacccggtaaaatacgcagaattttcctgggattggtcaaaaggagctcatcctgattatggtttcatcattcacatctgccccacgcagcggtttttactattttgcgcaaggctggaagctcgtctcgcaacctgggattcggcgtttcgttattttaccgctgctggtcaatattttgttgatggggggcgcattctggtggctctttacacagctcgatgtctggatcccgactctcatgagttacgttccggactggctacaatggctgagttatctgttgtggcctctggctgtcatctctgtgctgttagtgtttggctatttcttctccacgattgctaactggattgccgctccgtttaacggtttattggctgaacaactggaagcacgattgactggcgctacaccgccagataccgggattttcggtatcatgaaagatgtgccgcgaatcatgaaacgcgaatggcaaaaatttgcctggtatctgccgcgcgcaattgtattactaattctttacttcatccctggtattgggcaaaccgtcgcgccggtactgtggttcctgtttagcgcctggatgttagccatccagtattgcgattaccccttcgataaccacaaagtgccgtttaaagagatgcgcaccgccctgcgcacacgcaaaatcaccaatatgcagtttggtgctttaaccagcctgtttacgatgatcccgctgcttaatctgttcatcatgcccgttgccgtttgtggcgcgacggcgatgtgggtcgattgctatcgcgataaacacgcgatgtggcggtaacaatctaccggttattttgtaaaccgtttgtgtgaaacaggggtggcttatgccgccccttattccatcttgcatgtcattatttcccttctgtatatagatatgctaaatccttacttccgcatattctctgagcgggtatgctacctgttgtatcccaatttcatacagttaaggacaggccatgagtaagatttttgaagataactcgctgactatcggtcacacgccgctggttcgcctgaatcgcatcggtaacggacgcattctggcgaaggtggaatctcgtaaccccagcttcagcgttaagtgccgtatcggtgccaacatgatttgggatgccgaaaagcgcggcgtgctgaaaccaggcgttgaactggttgaaccgaccagcggtaataccgggattgcactggcctatgtagctgccgctcgcggttacaaactcaccctgaccatgccagaaaccatgagtattgaacgccgcaagctgctgaaagcgttaggtgcaaacctggtgctgacggaaggtgctaaaggcatgaaaggcgcaatccaaaaagcagaagaaattgtcgccagcaatccagagaaatacctgctgctgcaacaattcagcaatccggcaaaccctgaaattcacgaaaaaaccaccggtccggagatctgggaagataccgacggtcaggttgatgtatttattgctggcgttgggactggcggtacgctgactggcgtcagccgctacattaaaggcaccaaaggcaagaccgatcttatctctgtcgccgttgagccaaccgattctccagttatcgcccaggcgctggcaggtgaagagattaaacctggcccgcataaaattcagggtattggcgctggttttatcccggctaacctcgatctcaagctggtcgataaagtcattggcatcaccaatgaagaagccatttctaccgcccgtcgtctaatggaagaagaaggtattcttgcaggtatctcttctggagcagctgttgccgcggcgttgaaactacaagaagatgaaagctttaccaataagaatattgtggttattctaccatcatcgggtgagcgttatttaagcaccgcattgtttgccgatctcttcactgagaaagaattgcaacagtaatgccagcttgttaaaaatgcgtaaaaaagcacctttttaggtgcttttttgtggcctgcttcaaactttcgcccctcctggcattgattcagcctgtcggaactggtatttaaccagactaattattttgatgcgcgaaattaatcgttacaggaaaagccaaagctgaatcgattttatgatttggttcaattcttcctttaacggcataatgtttaatgacgtacgaaacgtcagcggtcaacacccgccagcaatggactgtattgcgctcttcgtgcgtcgcgtctgttaaaaactggcgctaacaatacaggctaaagtcgaaccgccaggctagactttagttccacaacactaaacctataagttggggaaatacaatgttccagcaagaagttaccattaccgctccgaacggtctgcacacccgccctgctgcccagtttgtaaaagaagctaagggcttcacttctgaaattactgtgacttccaacggcaaaagcgccagcgcgaaaagcctgtttaaactgcagactctgggcctgactcaaggtaccgttgtgactatctccgcagaaggcgaagacgagcagaaagcggttgaacatctggttaaactgatggcggaactcgagtaatttcccgggttcttttaaaaatcagtcacaagtaaggtagggttatgatttcaggcattttagcatccccgggtatcgctttcggtaaagctctgcttctgaaagaagacgaaattgtcattgaccggaaaaaaatttctgccgaccaggttgatcaggaagttgaacgttttctgagcggtcgtgccaaggcatcagcccagctggaaacgatcaaaacgaaagctggtgaaacgttcggtgaagaaaaagaagccatctttgaagggcatattatgctgctcgaagatgaggagctggagcaggaaatcatagccctgattaaagataaacacatgacagctgacgcagctgctcatgaagttatcgaaggtcaggcttctgccctggaagagctggatgatgaatacctgaaagaacgtgcggctgacgtacgtgatatcggtaagcgcctgctgcgcaacatcctgggcctgaagattatcgacctgagcgccattcaggatgaagtcattctggttgccgctgacctgacgccgtccgaaaccgcacagctgaacctgaagaaggtgctgggtttcatcaccgacgcgggtggccgtacttcccacacctctatcatggcgcgttctctggaactgcctgctatcgtgggtaccggtagcgtcacctctcaggtgaaaaatgacgactatctgattctggatgccgtaaataatcaggtttacgtcaatccaaccaacgaagttattgataaaatgcgcgctgttcaggagcaagtggcttctgaaaaagcagagcttgctaaactgaaagatctgccagctattacgctggacggtcaccaggtagaagtatgcgctaacattggtacggttcgtgacgttgaaggtgcagagcgtaacggcgctgaaggcgttggtctgtatcgtactgagttcctgttcatggaccgcgacgcgctgcccactgaagaagaacagtttgctgcttacaaagcagtggctgaagcgtgtggctcgcaggcggttatcgttcgtaccatggacatcggcggcgacaaagagctgccatacatgaacttcccgaaagaagagaacccgttcctcggctggcgcgctatccgtatcgcgatggatcgtaaagagatcctgcgcgatcagctccgcgctatcctgcgtgcctcggctttcggtaaattgcgcattatgttcccgatgatcatctctgttgaagaagtgcgtgcactgcgcaaagagatcgaaatctacaaacaggaactgcgcgacgaaggtaaagcgtttgacgagtcaattgaaatcggcgtaatggtggaaacaccggctgccgcaacaattgcacgtcatttagccaaagaagttgatttctttagtatcggcaccaatgatttaacgcagtacactctggcagttgaccgtggtaatgatatgatttcacacctttaccagccaatgtcaccgtccgtgctgaacttgatcaagcaagttattgatgcttctcatgctgaaggcaaatggactggcatgtgtggtgagcttgctggcgatgaacgtgctacacttctgttgctggggatgggtctggacgaattctctatgagcgccatttctatcccgcgcattaagaagattatccgtaacacgaacttcgaagatgcgaaggtgttagcagagcaggctcttgctcaaccgacaacggacgagttaatgacgctggttaacaagttcattgaagaaaaaacaatctgctaatccacgagatgcggcccaatttactgcttaggagaagatcatgggtttgttcgataaactgaaatctctggtttccgacgacaagaaggataccggaactattgagatcattgctccgctctctggcgagatcgtcaatatcgaagacgtgccggatgtcgtttttgcggaaaaaatcgttggtgatggtattgctatcaaaccaacgggtaacaaaatggtcgcgcctgtagacggtaccattggtaaaatctttgaaaccaatcacgcgttctctatcgaatctgatagcggcgttgaactgttcgtccacttcggtatcgacaccgttgaactgaaaggcgaaggcttcaagcgtattgctgaagaaggtcagcgcgtgaaagttggcgatactgtcattgaatttgatctgccgctgctggaagagaaagccaagtctaccctgactccggttgttatctccaacatggacgaaatcaaagaactgatcaaactgtccggtagcgtaaccgtgggtgaaaccccggttatccgcatcaagaagtaattcttgccgcagtgaaaaatggcgcccatcggcgtaatgccgatcagttaaggatcagttgaccgatccagtggctgtgtaagaatccggaaacgctcacttgtttccggatttttttatgcacattggacaggctcttgatctggtatcccgttacgattctctgcgtaacccactgacttctctgggggattacctcgaccccgaactcatctctcgttgccttgccgaatcaggtactgtaacgctacgcaagcgccgtcttcccctcgaaatgatggtctggtgtattgttggcatggcgcttgagcgtaaagaacctcttcaccagattgtgaatcgcctggacatcatgctgccgggcaatcgccccttcgttgcccccagtgccgttattcaggcccgccagcgcctgggaagtgaggctgtccgccgcgtgttcacgaaaacagcgcagctctggcataacgccacgccgcatccgcactggtgcggcctgaccctgctggccatcgatggtgtgttctggcgcacaccggatacaccagagaacgatgcagccttcccccgccagacacatgccgggaacccggcgctctacccgcaggtcaaaatggtctgccagatggaactgaccagccatctgctgacggctgcagccttcggcacgatgaagaacagcgaaaatgagcttgctgagcaacttatagaacaaaccggcgataacactctgacgttaatggataaaggttattactcactgggactgttaaatgcctggagcctggcgggagaacaccgccactggatgatacctctcagaaagggagcgcaatatgaagagctcagaaaactgggtaaaggcgatcatctggtgaagctgaaaaccagcccgcaggcacgaaaaaagtggccgggactgggaaatgaagtgacagcccgcctgctgaccgtgacgcgcaaaggaaaagtctgccatctgctgacgtcgatgacggacgccatgcgcttccccggaggagaaatggcggatctgtacagtcatcgctgggaaatcgaactgggatacagggagataaaacagacgatgcaactgagcaggctgacgctgagaagtaaaaagccggagcttgtggagcaagagctgtggggtgtcttactggcttataatctggtgagatatcagatgattaaaatggcggaacatctgaaaggttactggccgaatcaactgagtttctcagaatcatgcggaatggtgatgagaatgctgatgacattgcagggcgcttcaccgggacgtataccggagctgatgcgcgatcttgcaagtatgggacaacttgtgaaattaccgacgagaagggaaagggccttcccgagagtggtaaaggagaggccctggaaataccccacagccccgaaaaagagccagtcagttgcttaactgactggcattacgcccatcggcgccattttttatgcttccgccagcggcggcaaaatcaattcatcgctctcatgctgctgggtgtagcgcatcacttccagtacgcgcaaccccgcacggtgcaccgcatcgtttaacgccttccctttcagcaaaccactgataagctgagcacaaaacaggtcgccagtccctttcaggtcggtttttacccgtgaatgggaaatgacattcacgctgtcggcactgaccaccaccacctgcatctcctgattttcttcattaccggaggcgctggtaatcaccacccattttaatgtgtctgaaagcagactttttgcggcagcaatggcactgtcgagatcgcggcaatttttaccggtcaggatttccagctcaaagatattgggggtaattccttgcgccagcggcagtaaatattgtcgatacgcctcgggaaggtcaggtttgacataaattccgctatcaatatcgccaatcaccggatcgaccatgatcaataggtcaggatggtctttgcgtagcgcagtcagccactcggcaaggattttgatttgcgatgccgttcccatatagcccgtggttacagcacgaagttggcgcagcgcatcacgctcctgaagcgcacgcaaatagccgctaaaccattcgtccggaatcgcaccaccgtagaaagtgtcataatgcggcgtattgctcagcaataccgtcggcacggcaaagacattcaagccgttctgttttatagcaggcaccgcaatgctgttgcctacgctgccgtacactacctgcgactgcacggcgacgatatccgcctgcagcgccctactcttatcgttaaacaacaacaaactactcatttaattttttctccttgccgatgatcctcatcgtattccaaccgaaactttacctgattctggcagtcaaatcggctatcacaaaacaaggataaggtaattcaatgaagaaaatcatttgtctggtcattacactactaatgacactccccgcttacgcgaagttaactgttcatgaagaagcccgcatcaacgccatgctggagggattagcacagaaaaaggatttgatatttgtgcgcaacggtgatgaacatacctgcgatgaagcggtttctcatctgcgtctgaagctcggcaatacccgtaaccgcattgacactgccgagcagtttattgataaggttgcttcgtcgtcatcgattaccgggaagccgtatattgtgaagatccccggtaagagcgatgagaacgcacagccttttttacatgccttaattgcgcagacggataaaacggtgcctgcgcaataatcttaaatccccgccccctgactaaaatgctcttccccaaacaccccggtggaaaggtagcgatcgccacgatcgcagatgatcgctaccaccaccgcaccagggttagcttttgccacccgcagtgctccggcaaccgcgccgccggagctgacgccacagaatattccttcccgcactgccagttcgcgcatggtgttttctgcatcgcgctgatgaatatccagcacctcatccaccagagaagcgttgaaaatccccggcagatattccgcaggccagcggcgaatgccgggaatactgctgccttcttccggctgcaggccaacaatcgttactggtttggattgttcgcgcataaagcgtgaaacgccggtgatagtgccggttgttcccatgctggagacaaaatgggtaatgcgcccgccggtttgctgccagatttccggcccggtagtggtgtaatgggcgtaagggttatcgggattattgaactgatcgagcagctttccttcgccacgattcgccatctccagcgccagatcgcgcgcaccttccatgccctgctctttggtgacaagaatcagttccgcaccataagcacgcatcgccgcacggcgttcctggctcatgttgtcgggcatcagcaatttcatgcgatagcctttcagcgcggcaatcattgccagcgcaatgccggtgttaccactggtggcttcgattaagacatcacccggtttaatttccccgcgcttttccgcctcgacgatcatcgaaagtgccgcacgatctttcaccgaacctgccgggttattgccttccagttttaaccacacttcactgccgttatccggccccattcgctgcaacttcaccagaggcgtattgcctattgtttgttctaatgtactcacgatctctatccatacgtggtgttgcctgatgcgacgcttgcgcgtcttatcaggtctacaggttacaaaccttgccattaaaaagcccggatcgcgggaagcgcctccgggcgtttaacattcactcaacctatcaggcgctttgtgcgagagcaagttcctcatcgcgggtttcgatacgctcgtcgccgttatacagccgcgcatgttgcagaccaacgaataaacgctcgccacgctgcggggcatcgtcgccatgcatcacgaccgtcagcggttcgttgtaccaccccagcggctgcaccactaattgggtgtagtgacctttcgggctggcttccagtacctgtaccggcagcggcgaatcgagactggtacggcggctgatatccacttcccacgggcgcaggaagagatccaccggcccctgataagcaggtgtgtagcccagcggccagcgatgtgcgccaacatggaactgcccgccgcgaatggttccctgcaggcggttcacttcgcccataaattcgagcacaaaacgggtcgctggttcgcgccatacctgctccggcgcatcagcctgttcaatattgccctggctcatcaccactacacgatcagctacttccgtcgcttcttcctggtcgtgggtcacgaacacgctggtgaatttcagctcttcatgcagttgacgcagccagcgacgcagctctttacgcacctgcgcatccagcgcgccaaacggttcatcaagcagcagaatttgcggttctacagccagcgcgcgcgccagcgccacgcgctgtttctggccgccggaaagctgtgccggataacgatccgccagatgagcaagctgcaccatctccagcaattttgtcactttcgctttgatggctgcggcattcgggcgatcgcgacgcggcagcaccgtcaggccaaaagcgatattgtcgaataccgtcatatggcggaacagcgcgtaatgctggaacacgaaaccgaccttgcgatcgcgcgcgtgcaggcggctgacgtcggtgccgtggaagcgaatatgcccactggtttgatgctccagcccggcgataatgcgcagcagcgtggttttcccggaaccggacggccccagcaacgcgaccatctgacctgaaggaatatccagtgagatatcgttcagcacctgggtgcgaccaaacgacttcttaatattggcaatctcaatgctcatgatgttcctcctgctgtgcgcgtttttcctgattctccaggcgccactgcaacatactttttaaaaacagggtgataatcgccatcagcgttaacagtgccgcagcggtaaaggagccgacggtgttgtagtcctgctccagcaattcaatctgtaacggcagcgacagggtttcgccgcgaatcgagccggaaaccaccgacaccgcgccaaactcgccaattgcgcgggcgttggtcaacaccacgccataaagcagcgcccagcgaatgttcggcaatgtgacgcggcgaaacatctgccagccagacgcgccaagcaaaatcgccgcttcgtcttcctggctgccctggcttaacatcaccggcaccagctcgcgcaccacaaacggacacgtcacaaagatggtgaccagcaccattccgggccaggagaacataatttgcagattatgttcatccagccagccgcccagcgggccgttagagccgtagaacagcagatacaccagaccggcaaccaccggcgatacggcaaacggaatgtccagtagcgtcagcagtaactggcgtccagggaagttaaagcgcgtcaccagccaggccagcagaatgccgaacaccaggtttaccggtacggcaatcagcgcgatcatcaccgtcagccagatggcgtgcagcatgtccggatcggccagattctgtaaaaccggcatcagccctttgctgaacgcctgtacgaagatataaatcatcggcaccagcaggatgaacgccgataccagcatcccgatgccaatcagaaaccatttgccccagttaatcgggcgcgcgtcataacgcttcaattgggtaacttccgccattaatgacctaccacacgccgaccaaagcgactttgcagagtgttaattgagaacagcagcagcagagatgccgcgaggatcaccgaagcaatcgcgctcgctgccgggtaatcaaactcctgtaagcgcacaaaaatcatcagcgacgtcacttccgtcttccacgcgatatttccggcgataaaaatcaccgcgccaaattcaccaagactacgggtaaacgacagcgccacgcccgccaccagcgccggagaaagttccggcagcaccactttgcagaaactctgccagcgcgttgcgccaagcgtttctgccgcttcttcatattccgggcctaactcttccagcaccggctgcacggtacgtaccacaaacggaatgctggtaaaggccatcgccaccgcaatccccagccaggtataggtgactttgatatcaaacttcgccagccattcaccgtaaaaaccgtttacagaaaagagcgaggctagcgttaaaccggcgactgccgttggcagcgcaaagggtaaatccatcagcgcatcaagcagcgtgcggcccggaaagcgatagcgggttaagatccacgccatcagcaggccaaaaacgccgttaaaaatcgatgccacaaacgctgacagcagcgttactttgtaggccgctactacctgcgggttggtgatcacctcccagtactgcgcccagctcatctgagccagctgcatcaccagcgcggagagcggcagcagcaaaatcaggcacacaaacagcagactggtgccgaggcttaaggtaaagcccggcagcacgcgtcttgatgaaactgcaaacattaattacgccccgccgctaacagcttgtctaactcgccgccgctggtgaagtgggttttcatcacttccggccaggagccaaatttgtcttccacgcggaacagctcggtctgcgggaatttgtctttcagtttatccatgacttccgggttattcacgcggtagtaatagtcggtgatgatggtttgcgcctgcgggctgtagagccagttaaggtaggctttggcggctttttccgtaccgttggcctgcacgtttttatcaacccacgccaccgggaattccgccagaatgttggttttcggaatcaccacttcaaaaccctgcgcttcatactgtttacggatgttgttcacttccgactcgaagctgatcagcacatcgcccaggccgcgctcggcaaaagtggtggtcgcgccacgaccgccagtatcgaacacttcaacgtttttcaggaactgggtcataaactgttcggttttggctttatcgccaccgtcagctttatccgctgcgccccatgccgccagataggtgtaacgcgcgttacccgacgttttcgggttcgggaaaatcagcttcacatcggagcgcaccaggtcgttccagtcgtggatattcttcgggttgcccttacgcaccaggaagcccatggtggagtagaatggcgagctattatttggcaggcgcgtttgccagtccgccgggatcagcttgcctttgtcatgcaggatttgtacgtcagtcacctggttataagtgacaacgtctgcttttaagccctgcaaaattgccagcgcctgttttgatgacccggcatgagattgttttattgtcagtttgtcgccgccgttttctttggtccattgttgctcaaacggcgggttcagggcggcaaacagctcgcgggagacgtcataagaactgttcagcagttccgttgcctgtacatggcccgccagcagcagagaagcgaccagcgcgagtgagttctttttcagtaagttaacggccattgcgcacccttataaatttaatgactttctaatagccatcatatttataacggacgtgaaaggagtaacggttttatataccgtttggtgatttggaagttgaaaagggaataagaaccgggtttaaaacgaaatcctccccacaaatgcagggaggaaacagaggtgaatcagataccgacgctaaccgtctccggcagtgtgctgccgccatcaatcacattctgtgtaccggttaaatagctggattcatccgatgcgaggaaggccgccagttcgccgacttccagcggatcggcgaggcgacgcagcgggattgctttcgccatttcagtcagcaccgactctggatcttccgggttcgactggcgggcaatgctttccgccattggtgtgcgcacgtatcccgggcaaatggcgttaacgcgaataccagactgcgcgtactccaccgccagcgattttgtcaggccaacaatcgccgctttcgttaaggcgtacgccgtttcgccaggatcggccaccatatcaccagtgactgaagacatcatcacaatgcgaccatctttgcgggcaatcatctccggcagcaccgccttcgtgacgttccatacgcctttaatattgatgtcaatatggaaatcgcgatcgtcatcgctcatatcgaggaaactgcccagacgacaaacgcctgcgttattcaccaggatatcaatgcgcccttctttttccttcgcgcgtttgatagctgcggctaccgacgccgggtcacgcacatcggcgacaaccgccgtacagcgatgaccacgaccacacagttcgtccgccagcttttcgatctcaggggagatatccagcaagattaggtttgcgccatgacgcgcaaaagttctggcaattccttcgccaattccctgcaatgcgcccgtaatcagtgctgtcttgcccgtgagtttacccattttaatgctctccttgttaatacagagcgttacactccattccctctgaaaatacaggataaacaaaatattgctgcggatcagctcactaattcaggaaaatctcaatccagtcgctgctttatgcatcatttcaggcgttgtgttagctcactgctgcgctgaatcattttcaatgactccacatcattgagttgcacaagaccaacaaacagtaaatcggtaacagaattttgcgccgtgcgggtagacatcgacgagctacgccattcggtttcaccggaaacggtatcgagcgtgaaatgcgccagccgccgcagcggagagtcagccagagaagtaatggcaatcaccgttgccccctgctttcgtgccgcttctgcgcacaagacaatctcttttttactgccgctgtaagagatagcgatttgtacatcgccttttttcaacgcctgggaaacggtggcttgtacgtgtgtgtcggcttcataggccacgcgatagccaattttcatcagtttgaacgacagatcgcgccccaccagcgccgacccgcccaggcccgttatctggataaacggtgctttactgatgacctcaatgattttttgcagccgagcgtagtcgaacaacgcacaggtttgctccagcgccagctctttttcgcgattcagtttgcgggcaatcacttccagcgaatcatcactggtaatcgaactgtgcaggtgcagcgccgtggcattcgttttctcccggctggcactgtattcgccaattaacgccatacgcaattcagtaaatccttgcgcgccgagcttctgggcaaatttcacaatgctcgactgactgatgccgagctgtttcgccatcttgcgcgaagagacggatttcagctcactcacgttggcccgcagaaagtcagcaattttttgctcgttctcggtaaattcactttccgcattgcgtattttcgtcaggtacaacatcttccactctcccgggctggcagcaaaaattccgcttaagttcttatgacgctcttcacactctgcaagtgtagactcaatgattcctttaagtctgtcaattcgggatatatgattccatacatctgcaattatttgatcgtaaatagtaaggtcaccaccgatgcaacttgaaaagatgattactgaaggctcgaacaccgcctcggctgaaattgaccgcgtatcgacgctggaaatgtgccggattatcaacgatgaagataaaaccgtaccgcttgccgttgagcgcgtcctgccggatatcgccgcggcgatcgatgttatccacgcccaggtaagcggcggcggtcgtctgatttatctcggtgcgggaacatccggtcgtctggggattctggatgccagcgaatgtccgcccacctacggcgtgaaaccgggtctggtggttggtttgattgctggcggcgaatatgccattcagcacgcggtggaaggcacggaagatagccgagaaggcggcattaacgatctgaaaaatataaatttaacggcacaggatgtggtggtcggtattgccgccagcggtcgtacgccgtatgtgattgccggactggaatacgcccgccagctcggttgccgcacagtgggaatttcctgtaatccggggagtgccgtttccaccaccgccgagtttgccattacaccgattgtaggtgccgaagtggtcactggttcttcgcgaatgaaagcaggcacagcgcagaaactggtgctcaatatgctttccaccgggctgatgattaaatccggcaaagtgttcggcaacctgatggtcgatgtggtcgccaccaacgaaaaactgcatgtgcgccaggtcaatatcgttaaaaacgccaccggatgtaatgccgaacaagcggaagcggcgttaattgcctgcgagcgcaactgtaaaacggccattgtgatggtgctgaaaaatctcgatgccgcagaagctaaaaaacgcctggatcaacacggcggctttattcgtcaggttttagacaaggaataacccatggccaaagagatcagcagtgaacttctgaacaccattcttacccgtgtcggcggactgggaaatatcgccagttgtggtaactgtatgacgcgcctgcgtctgggtgtacatgacagttcactggttgatcccaatatcaaaacgctggaaggcgtgaagggcgtcattttgaccagcgaccaggtgcaggtcgtttttgggcctggtaaagcgcatcgtgccgcaaaagcgatgagcgagctgctgggcgaggcaccggtacaggatgccgcagaaatcgccgcccagaacaaacgtcagttaaaagccaaacaaacctccggcgtgcaacaatttctcgccaaattcgccaccatcttcacgccgctgatccccggttttattgccgccggtctgctgctggggatagcgacgttaattgccacggtgatgcacgttccggcagatgctcagggcacgctacccgacgcgctgaattttatgaaggtgttcagcaaaggtttgttcactttcctggtgattctggtgggctataacgccgcccaggcatttggcggcacgggcgtcaatggcgcaattattgccgcactctttttgctcggttataaccccgctgcaaccaccggttactacgccggttttcacgatttctttggtctgcccatcgatccgcgcggcaatattatcggcgtgctgattgccgcgtgggcctgcgcccgcattgaaggcatggtgcgccgctttatgtcggacgatctcgacatgctgctgacctcgttaatcaccctgctgatcaccgctacgcttgcgtacctgatcattatgccgctgggtggctggttattcgaaggtatgtcatggctgtttatgcacctgaacagtaatccgttcggttgtgcggttttagccgggctgttcctgatcgccgtggtatttggcgtgcatcagggctttattcctgtttacctcgcgttaatggacagccagggattcaacagcttatttcccatcctttcaatggcaggcgcgggccaggtgggcgcggcgctggcactctactggcgggcgcaaccgcacagtgcgctacgcagtcaggtacgcggggcgattattcccggcctgctgggcgttggtgaaccgctgatttacggtgtcaccctgccccgcatgaagccgtttgttaccgcctgtttaggcggcgcggcgggcggtttgtttatcggcctgatagcctgatggggtctgccgatgggcttaaacagcgcctttgggccgtctggtctggtagcgctgccgctgatgacttccgcacaaggcatccttccggccatggcggtttatgctggcgggattctggtggcatgggtttgcgggtttattttcaccacgctctttggctgccgtaacgtcaatctggactgatatcatgaaacggacaatgctctatctttctctgctggctgttagttgtagcgtcagcgccgcaaaataccctgttctgacagaaagctcgccagagaaagcagggtttaacgtcgaacggcttaaccagatggatcgctggattagccagcaaattgatgtcggttatcccggcgtaaacctgctgatcattaaagataatcagattgtgtatcgcaaagcctggggagcggcgaaaaagtacgatggcagcgtgttgatggaacagcctgtcaaagccaccaccgggacgctgtatgacctggcctcaaacaccaaaatgtacgccacgaacttcgccctgcaaaagctgatgagcgaaggcaaactgcatcctgacgatcggattgcgaaatatattccggggtttgccgatagtccaaatgacaccattaaaggcaaaaacaccctgcggatttctgacctgctgcatcacagcggcggtttcccggcagatccgcaatacccgaataaagcggtcgcgggcgcgttatattcccaggataaaggccagacgctggagatgatcaagcgcacgccgctggaatatcagcccggcagcaaacatatctacagcgatgtcgattatatgctgcttggatttatcgtcgagtcggttaccggtcagccgcttgaccgctatgttgaagagtcgatttatcgcccgctcggcctgacacatacggtatttaacccgctgctgaaaggctttaaaccgcaacaaattgccgccacggaattgaacggcaatacccgcgatggcgtgatccatttcccgaatatccgcacctccactctctggggtcaggtgcacgatgaaaaagccttttattcgatgggcggcgtttccgggcacgcaggtttgttttccaataccggcgatattgcggtgttaatgcaaacgatgctgaacggcgggggctatggcgatgtgcagctgttcagtgcggaaacggtgaagatgttcaccaccagctctaaggaagatgccacttttggcctcggctggcgcgtgaatggtaatgccaccatgacgccgacgtttggcacgctggcaagcccgcaaacctacggtcacactggctggaccgggacagtaaccgttatcgatccggtcaatcatatggcgattgtgatgttaagcaacaagccccattcgccagttgccgatccacaaaaaaatcccaatatgttcgaaagcggtcagttaccgattgcaacttatggttgggtagttgatcaggtgtatgcggcgttgaagcaaaagtaataaaaaggccagtcagttttgttactggctggcctttaatcatcgaatcagaaacgcttacaacgccattaacttgtccagcgacggcgcgaagtaatagccgccggttaccggtttggtgaaacgcaacatcgcatcacgcttaccatcggtatcgccaaacatgctcagcagttgctgctcaatgttatgcagacgcgcgcagtaggcgcagaagtacagaccgtgagtgccactggcggtgccgtacggcaggctctggcgaacaatcttcagccctttgccatcttctttcagatcaacgcgggtgaggtgagaggtttccggacgttcgtcgccgtcaatctcttcgttggcctctttggtgcgcccgatcatcatctcctgatcgtgaacgctcatccggttgagctgcttcaggttgtgctcccaacgctgcacaaacacatagctgccgccggcatccacgccgtctttgataaccgccacttcgcgacgcgtctcttcacccgccgggttttctgtaccgtcaacaaagccgctcaggtcacgctcttccacccaacggaagccgtggatctcttctttcacttcaatgcagtcaccaaaggcttccatcgccgcctgggcgacagagaagtttacgtcgtgacgcagagaaagaatgtggatcaacacatcgaactgggtggtcggcgcaaggcctttaccgtagcccggaaaatctttcagctcttctgccccaacgccgccgctcagagcgcgccaggtgttgttaccaaaggcaaccaccgcaccaagatgcgcgtccgggaatttcgcttcaaaagttgccagtttgtcggcaaatgttttactggccgcacgcagggcgtcaacttcccctttcacgttggcttcgatccaaatcgccgcgcggcaatgttctggcaaaatgccactctgaacctgagacattgttcctcctgaaaataagaatgccacgcaatccgtggcattgttgagcgctattttacgtgttttttcgcggcggcggtttgttcagacgcaaattaacgccgccagataattttactgactttccagtttttcagggtatcgtccgaaggcattaacccttcaggaccacgccattccccgctgaactggtagctaatatgttgactgccttcggctttacattcgacggcacgattatcatcaccatcagctttttggcaattgccaaatgctttgctgtaaaggtcgctaaacggtgtaccgattttaacaccggtgtcagcaggaatatcgctatccagcacgtcaatgcgactgatcgtgccttgatcgccgttaatcaccatcgccacgttgtcgcctttcatcacttcaaaaaagcgcaccacgttgccgttcgcggttttcattccgctgcgcaggcgataatcgccatcaagcgcatcagcaatggcttgttcttgcagtggtgtggacgccgttaattcacccacgccctgctcgctcactttggtggacgatccaaaccagttccacgggttagcggccgaccagttaactgacgacatcgtggaacagccggtcagcatcaacggcatagcgcataacattaaacgcagcgatttcatgtcacttcctttggttattcaataacgttgcttggagtgcaaattcaccaaaaagtgccgttattctttttcttcattaaaacaagcgcgtaaacgtcgattggtcagcagccagattaacgccacaatatccgccactaccagcgccagaccgataccgctaacggattcaccgttcagccacagccacggttgccagcaaagtaaaaccacctgcgccaacagcaacagaaaatagagcacatgccaagtgcgaggaaatgtagcccgccgaccgctcaacaaaaacgccagcaccgccggaatgcctggaatcagccccagccagaaattatcgtgatcgggataaaacagatttagcagcgcagtaccctgctcgcgcgacgcaccggcaatgacaaacagcacccaggttcgcgcctgaagcaatagcacaagccagaagagcaagggtaaacgcaggcgtccgtgcgcatcataatggacaggatggaactcagtactcttcatcttcaatcaaacgcttacccagactcagcacgtcggcgtgttcatatcccaggcgttcatacattccgagcaccatgtcgttatcttccggcacattgatctgaattttcgggcagccacgagcaatcagctttttctccagccgattaagcaacgcattggcaatcccacgcccacgaaactctggatgcacgccaagataataagcagacccgcgatgcccgtcataaccgcccatcaccgttccgaccacttcaccgtttacctcagcgaccaaaaacaaactgacgtcatggttcatcttacgctcgatgtccatttccggatcgttccacggacgcagcaagtcgcaacgctcccaaagggtgatgacctcttcgaaatcttcctggcgaaatacgcgtatctccatggtattcgttacctttttgcgggttaaaaggctgattatggcgtgaacggtcgaattagccaatatctgacgaaaatcggttgaaaaagtggcataatggggagttgtcaactattgaaatgaaaagtaaaacaattctcaacatcaaaccgtcgtaacggattacgcgatacgatataacatctggaactttattattacaactcaggccgtatgagcacttttaaaccactaaaaacactcacttcgcgccgccaggtgctgaaagccggtttggctgccctgacgttgccaggaatgtcgcaagccatcgccaaagacgaacctttaaaaaccagcaacggacacagcaagccgaaagccaaaaaatctggcggcaaacgtgtcgttgttctcgatccaggccacggcggaattgataccggagcgatcggacgcaacggttcgaaagaaaaacatgtggtgctggcgattgctaaaaacgtccgttccattttgcgtaatcatgggattgatgcgcgtttaacgcgttctggcgatacgtttatcccactttacgatcgcgttgaaatcgcccataaacatggcgcagatctgtttatgtcaattcatgccgatggctttaccaacccgaaagctgccggtgcttcggtatttgccctctctaaccgtggggcaagtagcgcaatggcgaaatacctgtctgaacgcgaaaaccgcgccgatgaagttgccggtaaaaaggcgactgacaaggatcacctattgcagcaagtgctgtttgatctggtgcaaaccgatactattaaaaacagcctgacgcttggctcgcatattctgaaaaagattaagccggtgcataaactgcacagccgcaacaccgaacaagccgcgtttgtggtgttgaaatcgccgtcggttccttcggtgctggtggaaacctcgtttatcaccaacccggaagaagagcggctgttaggcacggcggcgtttcgtcagaaaatcgccacagcgattgctgaaggcgtgatcagttatttccactggttcgacaaccagaaagcacattcgaaaaagcgataagttatgaaacccgacgcacaccaggttaaacagtttctgctcaaccttcaggatacgatttgtcagcagctgaccgccgtcgatggcgcagaatttgtcgaagatagttggcagcgcgaagctggcggcggcgggcgtagtcgggtgttgcgtaatggtggtgttttcgaacaggcaggcgtcaacttttctcacgtccacggcgaggcgatgcctgcttccgccaccgctcatcgcccggaacttgccgggcgcagtttcgaggcgatgggcgtttcactggtagtgcatccgcataacccgtatgttcccaccagccacgcgaatgtgcgtttttttattgccgaaaaaccgggtgcagagcccgtctggtggtttggcggcggcttcgatttaacccctttctatggttttgaagaagacgccattcactggcaccgcaccgcccgtgacctgtgcctgccatttggtgaagacgtttatccccgttacaaaaagtggtgcgacgattacttctacctcaaacatcgcaacgaacagcgcggtattggcgggctgttctttgatgatctgaacacgccagatttcgaccactgttttgcctttatgcaggcggtaggcaaaggctacaccgacgcttatttaccaattgtagagcgacgtaaagcgatggcctacggcgagcgcgagcgcaattttcagctctaccgtcgcggtcgttatgtcgagttcaatctggtctgggatcgcggcactctgtttggcctgcaaactggcgggcgcaccgagtcgatcctgatgtcaatgccgccactggtacgctgggagtatgattatcagccaaaagatggcagcccagaagcggcgttaagtgagtttattaaggtcagggattgggtgtaactccctcacccccattcccgcatccgctgatgcaacgtcaacgacggcttctcggcaaacagctgctggtaatccgtggcaaattgccccagatgccagaatccccactgcatggcggcgtcttttaccgttgtgctttgcgaccacgggcttatcagttcgcggcgtacggcgttcaggcgaatgcgtttcagccacgcgtttgggccaatgcctaaaatagcgtgaaacgcgttttgtagcgtgcggcgactgacatgcagttgattacacaagtccagcaccgtcaccagctcagacatattttccagcacatattcacgggcgcgggaaagtaatctacggtaactctgatgactgatgctttccgccgtcaccattggttgcgcgtcttccagcatcgcccccatcgccattagcaaattatcccccagcacttttcgcactgcaggctgatggagattttccgggttctcgcaaaacgtcgccagcgcctgttggacaaagccccacagcgcggctttatgctgctctttcacttccagcgccgactggctacgcagcatatgtaatacccgatccggattgtgcaaaaagttagcctgacgggtgatgacatcttcagacagcactacgcccaggatcgtataatcgtccggcgtacttaattcaaactcggttccaccggggcgcgtcgctatttctgcgcttcccagacattgcgaaccgataaatccctgctcaccgcgcgtcgccggaatgccaaaccagaacgagttcggccagaccaggcacgactgacgcagcgccagaccggtgtattcacgaaaaacctgaatatcatcgagcagaatttccgtaaattcaccatgaaacttgcccggatgcagctgatcgtaaatctgctgccaggcggtaatcgtcaaagcatgttcatagacatccgttgtctgtcgttgatgaacattatccacttcgaccttcggcgtgagcttcaggttttcgggtaagggttcatgataaagatggtgcaaattggctgtacgggtctttttcatgatgttaatgccgggtgttgtaggacacccggcacctccgacaggttaatggggcttgagacgataacgactactgcgtttacgtaacgtcccggcagaaaagagctgttcgagcgcatttctggctttttccagcggccagccaaagtgggcagccacttctcctgccgtcattccctgacgtactgatgttaacagcgccaacaactcgtcagcagattccgcgacgataactggcgcgtcgggttcctttacgggttgcttcggctggcggttaaagccagtaaccagccactgggtgtcatcgtctggccgaccgatctccttgcggctgatgacacgcccggtacgcatcgcggcagcacaacctgcgtccagcgccgcacgacacgccgccagatcgccttccaccaccagcgttaagcgaccagggtcaagcacttcgtgactgagcagacgaacgttagctgctttgagcatggcatccgctgcatctatcgcggcgaccatgccgtccacttccagcaatcccagtgcattgatcatcggcaacctccgttacgcacgctggattggattacgcgcgatttccagcactgcatcggtaaaggcgttacaggctgctttacacgcggcctggctaccggttaaaaatgctgccgagtagttggtttcagacggtggcgggacataggtcaccagctgtacgtcggcagatttcaacgctgcatcaatgccgtaggtcgcttccagcggcggtgccaccagatacgccatcggatcgccaagcgtgatcccggcggttgatgaaagataagaaccggtacgcgaaactacatgtgccaggaatgcggtgttttctgcgtcattagcccactggaaagcagcgccattttcaatatgcgcaaccatcgcatccagaccagcacgcacttccgccgggtttggcccaccaagcataatcagcacttcaccggcagtcggtgacggtccgtgtgctgctcccgcatacagcgagcggccatataccacttcgaccatcgcctgcttggtcgcttcgtcagccgcaatgtaggtgacgtcatcggaatcagcagaaatcagcccgaggctacgaatatgcggcggcaattttagttcacgcgcaaattcagcgttaacggaggcaatcacccgcatggcggttaccgacggtcgaatcaaatctaaagctggcatgatgcctccttatcgggtcatgttgatgccggatgctttctgctccagcatacgtttcgccaaatccacaatgacggctgcggcttcaaccggcggcgtgccgccctggtgaatgttagagatgcaggtgcgatcggcctcaacggtggtcgccatacgcggcgagtaaacggcgtaacaggagaggctttctgactgacccaaccccggacgttcccccaccagcaggatcaccactttcgcgccgaggatctcaccgatctgatcttcaatcttcacgcgaccataacgaacaaagaatggcgtgccgactttcagcccggcctgtttcaggcccgccatcagcggcggcaggatctcttcgtagttcacggtgatggcatcagttgacaggccatcagaaataacgacctgtacgtccggattagcaacacactgtgctttcagcgcttcaacagcttctgcacacaggcggcggcccatatccgggcgagtcaggtagagatttttgtcgctaatttcggagcgtacttccagcaagccctgcgctttcacccactcttccggcacttctttcagtacggtatctttcgaacgagagtgatcggccaggaaacgcagcagcgcctgcgtacgtggacgcggaccggtacgaccggtacaaacgcgggccacggtgctgcggcgcagttctgttaatacgtctgcgcgatgcgggttttcaacaccaatccacgcttttgcttccgcagaacctaaatccagcgcgcagctttccgaggtcaccggtgccgcacagttagtggtggcgcactttgcttctgacggcgcgggggccgcttgtcccattgacgccatcacgctgcgtacaatttcttcaatctgtttttgatccatgatgtgttatctccgcgtcatcagaagaacagtgacggatcgcccgcccgtttggtcaggcgaccgtttgccataatgcccatgctttccagccagcgttcaaactccggtgacgggcgcaggttgagtaactgacgcacagtggcagtgtcgtggaatgcggtggtctgatagttgagcatgatgtcatcgcccagcggcatccccatgatgtagttgcagcctgcggtggcgagcaggatcatcaggttttcgttgaggttctggtcaacgtcagcgtggttggtgtaacagcagtcacagcccatagagatgccgctcagcttgcccataaagtgatcttctaagccagcacggataatctggcggtcgttgtagagatactccggcccaataaagccgaccacggtgttgacgataaacggatcgtaatgacgcgccagcccatagttacgtgcttccatcgtcacctggtctgcgccgaagttagcgccagcagacagcgccgaaccttgcccggtttcgaagtagaggcagttttccccggcgatacggttgaactcagcacccactgcgcgcgcttcgtcgagcatcgccagttccacgccaaactctttcagccctttttcgctgccacagatactctggaaaatcagtccgccaggcgcgccgcgacgaatcgcttcgatctgggtggtgacgtgcgccagtacgcagccctgagttgggatgttgaatttgtcgatcacgccgtaaatggtgtccaacacgcggcttaagttttccacgtcgtcagttaccgggttaacgccgatcaccgcatcgcccaccccgaaggaaagcccttcgtagatttgtgcagcgatactttgcacgtcgtcacgggtgtcatttggctgcaaacgggcgctgaaggtgcccggaataccgatggtggtattggcctttttgattaccggcattttcttcgcgccgtagatcaggtccgcgttggagcaaatcttcgctaccgccgcgaccacttccgaggtcagccctttgcgggtaaaggcaatgtcgtccacgctggtttcatcgctcagcacatactcacgcagttcgctgatgctcctgtttttaatctggttgtaggccgtttcgttaacatcgtcctgaatcagccgcgtcacgcagtcatcttcataggcaatcaccggattattgcggatgtccgctacggtcatttccgacaacacctgctttgccgccacgcgctcctgtgagcttgccgctgcaacgcccgccagcacatcccccgaacgcagttcgttggctttagccagcacctcttttacatccttaaactgatatacattgccgaacaatgtggtctttagtttcataagtcgttccctcaggaaggaaatgcgagtgatttcaccgtcaccggcacaaccgatccgccaaaaagaggcgtaccaatgtcgatatagtcccccgcgcggacaatcacttcgtcaatgactgccaacgggagttgttgtagctgtgggcgcaacaacatgcccagagctttaccaaagtcctgcccggccaccaccagcaggggatgcggatttggaaaacgcgcgacgaaatcgaccagcgcgttgatgaccgtcagtaccgcggcgtaacgcacaggcagcgaggcgggaagcgccagcacgtacgcgtcagttttgggatcaagatccagctgaagcagcgcctgttgccaggcactcaccagatccgtttcatcaatcgggatcgccaccggcaaattgcgcagcggcagttgtacgccctcaagccagattgtgctgccagagagcgaaagggtatgcgcgcccgcgccaatcaccgtggcgcgcacggtttgcgccggaaactgtacgttcatctcacgcaggcgcggatggtcatgcagcgccgttgccagcagcgggccaatatcggcaaaacagaacgggtcggcgggctggtggcgataacattcgcccacgccgccagaaagcgtaatgatttcgggcgtaacacctgcgggcagcaaaccggtttgcatcaatgcctgcgcgagcggcgagagcgttccgtcaatcacttcgacaatcagttctgccatccgccgggtaacctgcaccagctgcgcgccggtcagcgaacgggcgtcggtgcctgcgccgaagcactcatccacaatcatctgccccggtttatgagcgtaaaccacgcgcccctggctgtcggtttccagcaggcgaccaccgacgttgaggcaggcagtgccgctgatttttccggcatcgaacagggcgtagttcgcagtgccaccgccgatgtcaatattcagtacccgacacagccgttgttcagaaagggtttgtgccccggcaccgtgaccggcaatgacggattcgaggtgcggcccggcgctggcaacgacaaaatcgcccagcgactgggagagcaccatcaccgccggacgagcattgcgggttttcgcgctttcaccggtgatgatgatggcaccagaatcaacgctttccggcgcaatgcccgcagcctgatattgctcgaggattaaggttttcagttccgcttcttttaaaccaccctgtttatcgacaggggtaaagaacaccgggctttgccagctaatttcgcgtttaatgaattcgtagcgcggcacctgcgacaccgccgcacggttaaccagctccaggtgggagaaaatcacctgggtggtggtggtgccgatatcgataccgacgctcaatagctggcgagtgttcacgattgtgcctccgcttcggttttagccgtggtcgcgtcttcttttggcaccagcatcatcgccacgccaatcgccgttacgccgccgatcaacttgccgacaatcatcgggaagatcatggcgttcatgttggcagcggcgaagcctaagtggtcgcccagggcgaaagcagcggaaacggcgaaggcgcagttgatgactttgccgcgggtatccatctgcttcatcatgccgaacatcgggatgttgttggcaagcgttgccaccatgccggctgccgcgatgttgttcatattcagcactttaccgacgctcatcagcggtttttcaaaccagcgggtcagcagcagcaccattggatacgcccctaacagaacgcaggagatagaaccgataacttcaatggcgcgcatcacttcaccgggtttatcgccaggggccataaagatagggtccagaccggggatcagttcccagccaagcagaaacttaactaccgcggcagcaagaccgagggtgatcaatgcaacgaggaatttggcgaagatctggaagccgttgatcattttttccgggatgaatttcagccccagcgccaccagaatcgcaacaatgatcaccgggatcatgttcatcaggatcagggcgaaagtgaattccaccggctgaccgttgatctgcacaccggagtacatagcaaccagaccaccagcaatacagccaatcggaatggtcacaatgcccgccagcacgccgagcgccagataacgacggtcagaaggttcgataatgccgagcgccaccggaatggaaaacacaatcgttggccccatcatcgacccaagaattaacccagagtatagccacgctgctacgtcgccgcccgccagctctttggcgaggaagaagccgcccatatcgcacgccagcagcgttccggcgaacattgacgggtttgcgccgagcatttcgtaaaccgggataattaccggcccgagtacgtgagccagtaccggtgccagcgcggtcataccgaccatcgccagacccagagcgcccattgccataaagccttcttcgaactgaccgcctgatccttcgatacttttaccgaacttaccgaggaaacgagcagaaccgccgaactgcgacaggatcctgtctacggcagctatcagcataaagaacatcatgatgtacatgatgatttcgttaattcccatcgcctttactccctgttagttgttatttattggcggatgcggcgtaaacgccttatccgccctacatgtgcaatcccgaaggccggatcagacgcggcaagcgtcgcatccggcaattgcaccgcgccactggcggatgcggcgtgaacgccttatccgccctacatgtgcaatcccgtaggccggataagacgcggcaagcatcgcatccggcaattgcaccgcgccactggcggatgcggcgtgaacgccttatccgccctacatgtgcaatcccgtaggctggataagacgcggcaagcgtcgcatccggcatttattgcgccgccgcgtacagtccgacaatctgttccaggctggcggtacgcgggttactgcgcagacaaatatcttccagcgcggcctgcgcccatgcgccgtaatgcgcagatgtcgcaccaacatcgcccagtcgtttaccaatcccaacttccgcaatcagctcacttaccgcgttaatagcgtcacgatcgtcggattttttagttcgcagtgcccgaccaatctgactaaagcgttcacgacaaaccatccggttaaattccatcaccgttggcagcaacatggcgttcgccagaccgtgtggaatatgcagcgccgcgcccggctgatgcgccatcgcgtggcacaacccaagacccgcactggaaaacgccattcccgccatacatgaagccagcaacatgctctcgcgcgcggcaaggtcgtgaccgtagcccaccgctttcggcagcgatttgccaatcatcgcaatggcaccaatcgccagactgtcggtaaacggtgtagcgttcagggcgctgtatgcttcaatggcatgggttaacgcatcaatgccggtcatcgccgtgacatgcgacggcacaccttcggtcaacgcggcgtcgagaatcgccacatccggcatcagcgaggcatgggctaacacctgcttgcgcccgctcaccgcgtcgataatcaccgttacattggtggtttcagagccggttccggcggtcgttggaatggcaatcagcggcaagcgcggttgcagaacgctggtttctgacatctctgccagcgtgctatccgggttcgtcaccagcaacgccacggctttcgccgcatccagcaccgagccgccgccaaatgcgatcaccccatcacagcctgactcacgcaactgcgccacggctgcacacacgtcggtgatgcacggttcgcccaccggacatggccagagcgtcatggcgatgcctttaacagccaggctgcgcgtcagcccggcggtcatccctgcctgatgcaaaaagctgtctgccatcacgaacagatgtttcagcccacgcgtttgcgcttgctgtccgcaactgctcaccgagcccggaccgcaaagcgtcaccggtggaacgctaaatgtttttacccgttgcagattcagggtatcgaacgcctgaaagagcgcggtctgcaattcattttgcatatagcccctccgctttctctcgcccactactggcgatcgccagcggggtcataaacaaactgtgctgcggtaaatgcacctgtaacgccgggaattgtttgcgaaacagttccgccacgcccggttgcatacaagagccgcccgccagccataaatcagtaatgccctgcccttcaatatgccgggcgacaatgtccgccattttttcgtacaccggtttcaccgtaggccaaatctcttcaccgtgaccgcgcttgtactgctccgcctcttccagcgaaatacggcgatttccggcgagagtcagagagatgtgatgtccgccggttgcttcatccgccgagtacgtcaccttgccctttttcacgatggcaatgccggtagtgccgccgccgatatccactacaccggcgttgtccagttgcagcagatccgcaactgcggttggctcatccagcacatggctcacttccagtccagcagactccagcacgttgatggaaatacgcgggtccgtacctggaggaaatgaagtcgccgcatggctaaaacggcgaccgaattgctgctcgagcgtgtcgagatggcgacgaacaatggtgacagcgccgaagaaatcccagacgatgccgtcgcggaccacatcggcccagtcgaggcataccgccaccgactgaccgtcgcggtcgacaaccatcgacaccacatcgcaggtgcccagatccacccccagccacagcggagattccgtcgcggcgggcgtctggttacacagcgttgccgccgtttgcagacgtggggtgagccattgttcgtcgtgcgccatctgttactccttaaacaatgcgaaacgcatcgactaatacacagcgacgcagacggacaaacgtacgcacgctagttaccccttcaccggttggcgtggtgatggtcatggtggtccagccttccccgcccagccccagcccggcaatgcgcggtccgttcttaacgaaaatgctggtatcaatagcattcgccatctggttcatgttttcgatgttgcgcgagtgcattgccgccgtgtggtggcaaccgccttccagtttcaccgccagcgcaatggcatccgccacgttggcgacgcgcacgacgggcagcaccggcatcatcagttcggtcacggcaaacggatgttctgcagtggtttccacaaacagcaaacgcgtttcttgcggcacgttcaggccgattgccgccgcgattttcgccgcatcgcgaccaacccagtcacggctgacggtgccttttccgcgctcgtcgatatttttcagcaacaccggttgcagctgctgcgcctgttctgcggtcagtttcaccgcgtgctggccttccatcagacgcatcagttcatcggctacgctatcaacaacaatcagtaccttttcgtcggcacaaatgatgttgttatcgaaagaagcgcctttgacgatggactgagcggcacgggcgaggtcggcggtttcatccaccactaccggcgggttgccagcgcctgcggcaatcagacgtttattggtgtgtttacgcgccgcttctactaccgcttcgccgccggtcaccaccagaaggccgatgcccggaaacttgaacaaacgctgcgcggtttcgatatccggatttgccacagtaaccagtaagttttccggcccgcctgcggcaacaatcgcctggttgagcagcgtgatcgcccgctgggagacttttttcgccgccggatgcggggcaaaaatgacgctgttgcccgcggcaatcaggctgatggcgttattaattacggttgccgccgggttagtggacggagttaccgaagccaccacgccccagggcgcgttttcaattaaagtcaggccgttgtcgccggtcagcacctgcggagagagacactcaacgcctggcgtgccgcgcgcctgagcgacgtttttggcaaatttatcttcaacgcggcccatgccggtttcactgacggcaagttccgctaaatctctggcgtgtttttcgcctgcctcacgaatggcagcaatggctaactggcgcattgccacgctttttaacccttgctgggcgactttggctgccgcaacggcgtcatccagggacgcgaaaacgcccatctcatgaacggcggcgggcggcgtgtcactgctttgcattttcagcagtaccgctttcaccacctgttcaatatcctgttgattcatgatgttctgccttatttgtggaaaattacctgaccgccagacaccacctcatcgacaatgccaatcacgcacagatcgaccggtgacgtttcgcttttatgcgcctggcgggcggaactgccactcaccagtaacacccactccccggttcccgcgccaatattgtcgatggcgacggcgcattgcccgtcaggattaccttgtggatcaatcatttccaccatcagcaatttgtcatgcgccagtccgtgatggcgtacggtacaaacaatttgtccagtgacgactgccagtttcatacccgcctccgtggcgtatttcaggtaaaagctccccctaccctccgcagaaggtaaaatgaaaaaggagagagcgtgacgcccgaatcgacgtcacacagggtgattacaggttgctgctatcgcctttcaggccgatcgggaagacttcttccaggtcgccgtgcggacgcgggataacgtgtacagataccagctcgccgatacgctgtgccgctgcggcacctgcatcggtcgcggctttacaggctgcaacatcaccacgaaccatggcagtacacaggccgccgccaatctgcttaacaccaaccagcttgacgcgcgcagctttaaccatcgcgtcagaagcctcaatcagtgcaaccaggccccgggtttcgatcattcctaatgcttccattgtgctttcctctttatcagggtccagaacgggaccgttcattcaaccagtgtttgtaaactgctttcgcggttcacttctgtctgacgcggcacagctgccaccagcgccagctcgataatttcctgcacgctacaaccacgagagagatcgtgcatcggcgcggcaagtccttgtatcaatggcccgacggcacgatatccgccgagtcgttgtgcgattttgtagccaatatttccggcttccagcgacggaaaaaccatcacattggctttgccctgtagcgggctggcaggcgctttttgcgccgccacttccggcacgaaggcggcgtcaaactgcaactcgccatcaaccaccagctttggtgcgcgctcacggacgatttctgtcgcctgctggacgttggcaacgcaggggtgacgggcgctaccgttactggaaaacgacagcatcgccacgcgcggctcttctccggtgagggcgcgccaggtttcggcactggcaagcgcgatatccgccagttgcgccgccgtcggctgtggcaccacgctgcaatcggcaaagcccaacgccggaccgctgtactgtggcagcatcaggaaaatggatgagagcgttttacagcctggctgcaagccgataatacgtaatccggcacgcagcacattcgccgtggaagagaggttgcccgcgatacagacatccgctttaccggcgctgaccattgctgcggcgaacatcagcggatcggtaagtttttccagcgcatccggcggcgttttttcgcccgcgcgggccagccagcgatgagcaaattcttcccgcattgcgaggttgccatgcggatcaatcacctgtagcccgtccatcgccacgccgtgactgagcgcaaactgacgaagttcaaacggattagcgaccagaatgggcgttgccagaccttgttgatgtaaatattgcgcagctttcagcacacgttgatctaacgcatccggaaaaaccactctggcgggcgctcgcaacgccagttcacgacaacgttcaataatcattgcgtttcccccagtcgttgttggatctgcttcaccgttagcggcggcttcgttacgctcaggatcatcattacgtagaccgtgctcgaaaggcggttcagcgcctgcaagatgtccgggcgtaatacttcaaagctgcgggtgataaacacctgcgccgctacggtttcggtttcccgcactttggtacgtagcagattgagcaacgccgcatcgcgcccgtggctggcttccggcaccagatgatcgtggtcgagatagcgcagcggctggtgagaaagtcgatgcagatcttcgtcagaaagcccgacaatcgcctggcagcccagcggttcccccagcgcatcggcgcgcataatgttgccaagacgcgaacggatatccgccagccacggctgccacggttccgccagttcaatttgcagccacactgccagcgcaatggtgctgtcgagaaccgcgcgaaaacccagacgcggatcgcttttggcgaccattttttccgccgacaggtgagtcagcgtatccggcttttttgccaccggctggcggcacagttcgcagcacgcctgcggatgttcatcgctactggtcagcccatgaacgggctgcggctgctgctgttcatcgtcaacaaacaggcggccctgctcgtcaataaacttgatgcgcagatggcggctttccagcaactcccgggcagagggcgtcaggcgactgtccgcagggagatggatctctgcgccttcgctgagcgtatggttcgctcttagccatgcttcggtgatgaaatctttcatagggattgccagttagccggccaggcgacatacaggaatttcacgctggatgtcgtaccaaattcgatgctggagcctttcgggataaacatcacgtcgcctgctttggcgatcatggtttcgccttcgtggcgaacatggagctccccttccagcaccatgtcgatttcgtcgtagttcagggtccacgggaagaatgcgttctcccactgcataaaaccggcggccatgctgctgccgtcgtctccggtcacaagatcagtcaagcccacgcaatgcggttgtgcgccatcaaaacgaccaaacttgacgctgctgccatcaatcactttgatgccgcctttgccggtcaccgatttgaagctcggctgcattgcgccctgctccagcgactgtttttccttcatcactttttccatcagctgtgcgaccaggctttcggtaaactggccttccggcagctgggcaatgatggtttcgcggatgcgctggctttcggttttgtcggctggcacgctggcgggcacggacgccgttaccgggatcgattcatcacattcggtgatggtaaaacccagtagatccgccactttacgggcttccggggtaataatgctggcgcgcagaaccacggacattgcctgttcgccgcgcgcgtgtgcttcacgaatatcattcgctgtgatgagttttttcacctgcttcctcctgtttggtgagagatgccagataatccaccagttgctgcacgctttgcgggtcgtggctgtttagctcgaaaatcggctcttcgaaacccgtctcaagcaataactttcgcgttgcggcgacgtcagcatctggcatgtccgttttactgatgacggcgatttgccgtttgctgacgccaatatccagcaacccggcaggcaaccgactttccgggtcatttgcgccatggacatagatcagcatgtctacatcctgtagcgtggtaattaaggcgtgataccagcggggatggctaaaatattcacccggcgtatcaatatcgcccttatcattaaattccacggcctgtgtttttctggcgagggtataattcccctgcaacgcattaaataacgttgtttttcctgccccgacgctacccacaaacgcaattcgtttcatgaatgcctcgtattaacttttggtcatttcacaaagcgtataatttaataagcgacctaaaccgctgacggtttgtgataacgcttcttctactgcgcccaccgagccataaatcaccaatgcaccgctgaagcggtcgagaaaaccgatatgcacatcagcggctttcagcgctaaatcaccgacgatcatcgccgtttcgccgggagttagcgtcataatgccaattgcgcccgcatccggaacgccgattttcttcgccagttcctcaccgggatgcgcgatgagatgcgccagtgtgacctgtttgccgggcacaaattcctgaatgatgcgttctttatccatgagtcgccgcctgtgaaaaactttcgtgtatcgtgacaatttttcgtcagagtaaataacaaaattcggcaagcgcgtttaaaaggtgaggtagatcactaagaatggagagatattcgctgtggtgcataaactttcatatgcaacgcatgaatataaataaaataatatcgagatattatatagactgcttttttttattattcgcaaactcagtaataagctttactaatatattgcagccaaaccgcttaccctgaatattcagggtaagcgtgagagttaaaaaagaattacagcggttgggtttgcgcttcaaccacggccagcgccaccatgttgacgatacgacgcaccgatgcgatcggcgttaacacgtgaaccggtttcgccacgcccatcagcaccggaccgacagtcacaccttccgagctggaaacgcgcagtaagttgtaactaatgcgggcagcttccatgttcggcatcaccagaatattggcagaacctttcaaagggctgtccggcatacggtcgttgcgaatcgcttccaccagcgccgcatcgccgtgcatttcaccatcaatcatcagttctggcgcacgttccctgaccagttccagcgcctgacgcattttgctcgacgacgggcagtcagaagaaccaaagttggagtgcgacaacagagcaacgcgcggttcaataccgaaacgacggacagtttctgccgccatcaaggtgatctccgccagctcttctgcgtctggttcgtcattgacgtaggtatcggcaataaaggtgttaccactcggcagcagcagcgcgttcattgcacctgcggtgtgaacgccatcgcgataaccaaagacatttttcaccacgctaaaatgttcatgataatcacccaccgtaccgcaaatcattgcatcggcttcgccacgctgaaccatgatcgcgccgatcactgtcgggttactgatcagcgcccgctgcgcctgttcctgagtgacgccgcgacgcttcatgatctggaagtattcggtccagtactctttaaagcgcggatcggattcgttattgacgatctcaaaatcaacgcccgctttgatctgcaagcccagtttctgaatgcgcatttcgatcacgttcggacgaccgataaggatcggtttcgccagtcccagcgttaccagttcctgagtggcatgcagaacgcgcgcctcttccccttccggcagaactacgcgcttcggcgctttgcgagcctgggagaaaatcggcttcataaacaggttggttttgtaaacgaactcagtcagcttgtcgatgtagacgtcgaaatcagcaatcggacgcgtcgccacgcccgactccatcgccgctttcgcgaccgcaggagcgatcttaacgatcaagcgcggatcaaacggttttggaatgatgtattccggaccaaagctcagatcctgatcgccatacgctgaagccaccacttcgctctgttccgcatgggccagttctgcaatcgcgcgtaccgccgccagtttcatctcttcgttgatggcggttgcgccaacgtccagcgcgccacggaagatgaacgggaagcaaaggacgttgttgacctggtttggatagtcagaacgaccggtgcagatgatggcatccggacgcacttctttcgccagcggcggcagaatttccggttccggattcgccagcgccagaatcattggtgcccgagccattttcttcaccatttcctgggtcagcactttcgggccggaacagcccaggaaaatatccgcaccttcaatcacatcatcgagggtacgtttgccgtcatccaccaccgcatatgcggctttggtttccgccatgtttggctcacggccttgatagataacgccttttgaatcgcaaaccacgatgttatgtttttgcagacccagcgctaccagcagattcatacaggcgattgctgcggcacccgcgccggaaaccaccatccgcacgtcggagatgtttttctccaccacgcgcaagccgttgaggatggcggcagtgctgatgattgccgtgccgtgctgatcgtcgtggaataccggaatattcatccgctcgcgcagtttctgttcaatatagaaacattctggcgctttaatgtcttcgaggttgattccgccgaaggtcggttcgagcgcagcgacaacttcaataaatttgtccgggtcgagttcatcaacttcaatgtcaaatacatcaatcccggcgaatttcttaaacagaacgcccttgccttccatcaccggtttgccagccagcgcgccaatgttgcctaaccccagcaccgccgtaccgttagagatcaccgccaccaggttaccgcgggcggtatatttgtaggcttttaacgggtctttttcgatttcaagacaaggtgcggcaacgccgggtgagtaggccagcgccagatcgcgctgcgttgccagaggcttggttggagaaacctggattttccctggaactggaaattcatggaaatcaagtgcactttgttttaactggtcatccatttggttgttcctttcacgtaacgttcacaaataaagtgtgtgggcaacaccccctgcccacaacgtggcgcacattattaccttgccggagtctacagactttgagcaagtccaaactctcaccattaatataatgttttggtaataatcctataacactgatgttacctgcttaatccagcaataccatgcctgtctgctatgcttttttgatgcgtttagcgaaatttctcagaagtgtgaattaacgcactcatctaacactttacttttcaaggagtatttcctatgaacgagttagacggcatcaaacagttcaccactgtcgtggcagacagcggcgatattgagtccattcgccattatcatccccaggatgccaccaccaatccttcgctgttactcaaggctgccggattatcacaatatgagcatttaatagacgatgctatcgcctggggtaaaaaaaatggcaagacccaggaacaacaggtggtcgcagcgtgtgacaaactggcggtcaatttcggtgctgaaatcctcaaaatcgtacccggtcgcgtgtcaacagaagttgatgcacgcctctcttttgataaagaaaagagtattgagaaggcgcgccatctggtggacttgtatcagcaacaaggcgttgagaaatcacgcattctgatcaagctggcttcgacctgggaaggaattcgcgcggcagaagagctggaaaaagaaggtattaactgcaacctgacgctgctgttttcttttgcacaggcacgggcctgtgcggaagcaggcgtttttctgatttcgccgtttgtcgggcgtatttatgactggtatcaggcacgcaagccgatggacccgtatgtggtggaagaagatccgggcgttaaatcggtgcgcaatatctacgactactataagcaacaccactatgaaaccattgtgatgggcgcgagcttccgtcgcaccgaacaaatcctcgccttaaccggctgcgatcgactgactatcgcaccgaatttgctgaaggagctgcaggaaaaagtttcgccagtggtacgtaaattaatcccaccttctcagacgttcccacgcccagctcccatgagcgaagcggagttccgttgggagcacaatcagtatgcgatggcggtagaaaaactgtctgaaggcattcgtctgttcgccgttgatcaacgcaaactggaagatcttcttgccgccaaactataaaccagccacggagtgttatatgtcccgaaaagaccttgccaatgcgattcgcgcactcagtatggatgcggtacaaaaagccaattctggtcatcccggcgcgccgatgggcatggctgatattgccgaagtgctgtggaacgattttcttaaacataaccctaccgacccaacctggtatgatcgcgaccgctttattctttccaacggtcacgcgtcgatgctgctctacagtttgctgcatctgaccggttacgacctgccgctggaagagctgaagaactttcgtcaactgcattcgaaaaccccaggccacccggagattggttatacgccaggcgttgaaaccaccaccggtccacttggacaaggtttggcgaacgccgtcgggctggcgatagcagagcgtacactggcggcgcagtttaaccagccagaccatgagatcgtcgatcacttcacctatgtgtttatgggcgacggctgcctgatggaaggtatttcccacgaagtctgttcgctggcaggcacgctgggactgggcaagctgattggtttttacgatcacaacggtatttccatcgacggtgaaacagaaggctggtttaccgacgatacggcaaaacgttttgaagcctatcactggcatgtgatccatgaaatcgacggtcacgatccgcaggcggtgaaggaagcgatccttgaagcgcaaagcgtgaaagataagccgtcgctgattatctgtcgtacggtgattggctttggatcgccgaataaagcaggtaaggaagaggcgcacggcgcaccgctgggggaagaagaagtggcgctggcacggcaaaaactgggctggcaccatccgccatttgagatccctaaagatatttatcacgcctgggatgcccgcgaaaaaggcgaaaaagcgcagcagaggtggaatgagaagtttgccgcctataaaaaggctcatccgcaactggcagaagagtttacccgtcggatgagcggtggtttaccgaaggactgggagaaaacgactcagaagtatatcaatgagttgcaggcgaatccggcgaaaatcgccacccgtaaggcttcgcaaaatacgcttaacgcttatggccccttgctaccggagctgctcggcggttcggcggatctggctcccagcaacctgaccatctggaaaggttctgtttcgctgaaggaagatccggcgggcaactacattcactacggggtgcgtgaatttggcatgaccgctatcgccaacggcatcgcgcaccacggcggctttgtgccgtataccgcgacgttcctgatgtttgttgaatacgcccgtaacgccgcgcggatggcggcactgatgaaagcgcggcagattatggtttatacccacgactcaattggcctgggcgaagatggtccgacgcaccaggctgttgagcaactggccagcctgcgcttaacgccaaatttcagcacctggcgaccgtgcgatcaggtggaagcggcggtgggctggaagctggcggttgagcgccacaacggaccgacggcactgatcctctcaaggcagaatctggcccaggtggaacgtacgccggatcaggttaaagagattactcgtggcggttatgtgctgaaagacagcggcggtaagccagatattattctgattgccaccggttcagagatggaaatcaccctgcaagctgcggagaaattagcaggagaaggtcgcaatgttcgcgtggtttccctgccctcgaccgatattttcgacgcccaggatgaggaatatcgggagtcggtgttgccttctaacgttgcggctcgcgtggcggtggaagcaggtattgccgattactggtacaagtatgttggtctgaaaggggcaattgtcgggatgacgggttatggggaatctgctccggcggataagctgttcccgttctttggctttaccgccgagaatattgtggcaaaagcgcataaggtgctgggagtgaaaggtgcctgatagtgatcgccggatgctgattgccggatgcgacgctgacgcgtcttatccggcctacagcgtcttatccggcctacatgtccccgccattttgtttaacgggtgatccacaacgtgggccaggcgtctggcccatgccagttatcgcaggtgggttctgcggcgtaacgcaccaggcgaaaacgctgaccgtcaaagcgccagcgcgcctgaatgccacaatcgcttaatccgcgccctttcgctaaggtcaccagttcacgcgatttctcatcaaatgttgcgttcatcagttccagttcattcgtctcctgcccgttgttgaacggcaaacgcaaccgaaccgggcgcgaggctagcggctttttacgcgacacaatccatgccaaatcaatggtgttataggcccctgcctcacagctgatcatcatcagcgctttatcatcagtcagcgcagtgacattcacctcacgacgtaacggatcaagcgagcagcgcagaccattcatccgccagtttccataatccagcaaatcgttgcgttcttcgagtgagagtggcgtcggcgttgggttaaccaccgcgacctctttcagcgcaggcgcgggcggtacgctgagcggcggttcgtcccctttcttgatccacgcggtttcactgccaacgcgcttttgctgagcatcaataaacaacaacgccgcttttaagccactcagagaaatggtctgattgccgtcgcgtaaggtgatcgccttcccttcctgaatcatctgcaaaaacgcggtgatggttgccgtatcatcggttactaataaccatggtgaaatccgccacttgtcaccacttaacgccaacggctcaccatctaacagcagccgtggcgctatctctccttcagacgcatccggcgacttcaacccgccgcgctcaatacgtaaaacggcatcggtatgcgccccggcgctgcggctcagggtcatcaccagtccattatgatcgcccgtattgcgcgccacgcagaagttttggttattacaggtgacctgccagtcggaaaacgcccgttgcgctagtgccgcccacaccaaagacgtcggcaacaaagcgaaaaaaaagagaaggaaaatgcgatagcgcatggacggtacgaccccagaagttcaaacaaacagcacaagtcgtatcttcgttgcgcaggtagcgcggctcaatcagatttgtcggattgagccaataataaacaacgaaatattattgttatttttcagtccattaaatgtgacgtttgcaaatagttaagcaataacaccgtcttaccgtcacgtatctcgccggttttgatcatctccagcgcctggctgaacggcagctcgagcacttcaatatcttcatcttcaacaccgccaccggcgttagcgcgctgattgtcactgtattcggcgataaaaaagtggattagctcagtcacaccgccaggcgacatatacagttcaaataatttgcgcacttcgcccacttcatagcccgtctcttcaatcgcttctttacgaatgcacacttccggttcgtcgttatccagcagcccggcgcaggtttcaatcagctgcccgctttcattgccattaacccaggtagcgacacggaactgacgaatcagaaccacggtctttttcttcgcgttgtacaggaggatcgtcgcaccattaccgcgatcgtaaacttcacgtttatggcggataacttagccatctttgcgcgtgagatcgtaagtaatgttgtgcagggtgaaatagttatcggagagaattttgtctttaatgagggtgatttgttgcgtcataccgactccacagcgcgaaatgaacaattatattacgctgtgaagtcgggtttgtctgcgcaggctatcagtgagatttgactgattttacccccagccagtcaataatcccctgtgccgcatgacgtccttctgccattgcggtaaccaccagatccgcaccacgcacggcgtcgccaccggcgaagattttcggattggtggtctggtaacggtactggctttccacatccgcgatgatgcggccccatttgtctaccgttacaccgtgcgactccagccacggcatcccgtgtggattgaagccaaacgccataatcaccgcatcggctggcatgacaaattcactgccctcaatcggtacaagtcgccggcgcccctgggcatccggctcgccaagacgcgtgcgcaggaaacgaattccgcaaacgtgaccttgctcattcagctcaagcgccaccggctggacgttaaattcgaagttggccccctcttcgcgggcgttcttcacctctttcttcgagcctggcatgttagcttcatcacgacgataagcgcaggtgacgttactcgcgccgtggcgcagcgcggtacgcacacagtccatcgcggtgtcgccgccgcccagtaccacgacgttgagtccggcggtattgataaacggctcttccggtagctcttcgagtcccatcacctgtttagtgttggcgatgaggaacggcagcgcgtcataaacgcccggcgcatcttcattgggtaaacccgctttcatggaacggtaagtgcctacgccaacgaagaccgcgtcgtattgttccaaaagcgaatccaaagagacatctttacccacttcacaattgagttcgaagtgaatccccatcgcgctgaagatttcccgacggcgtgccagcagggatttatccagtttgaaagaaggaatgccgaaagtgagcaagccaccaatttctggatggcgatcgtacaccgtcaccgccacgccattgcgggtcagaacatccgcacaggccagccctgccggacccgcaccgataatcgccacccgcttgtccactttggtgacatggcttaagtcaggacgccaacctttcgccaacgcctgatctgaaatgtagcgttcaatgttgccgatagttaccgcgccgtgctcatcgcgaatagtacaggcaccttcacacaaacggtcctgcggacaaacgcgtccggtaatttccggcagggtgttggtcaggtgagaaagctcgacggcggcgtcgatgtttccggctttcaccagttcaatccactgcggaatatggttatgcagcgggcaggtccattcacaaacgctgtgctcgccgcatttaaggcagcgcgaggcttcccgttgtgcctgatcggcacggaatggcagataaatttcatcaaaaccggttttgcgcgcttcaatcgccagtttatccggctcgccacgcgcgggcgttgcctgcatttgttcgactttactcattaccggcatttcttgtgcagcggtactggcatgccacggttgatgctcctgacgtgcggtgcgcaagcggcgggatttcgccatgccggagagtgcgacgtcagtgaccagttgcagcgcgtccgccgggcaattctcgacacaggcaggaccgttttcgcgccctgcacaaaggtcgcatttatgcgccgtggcttttacttttcctgccgcgacgggtgtcaggacgatttgcatcgtaccaaacggacaggccaccacgcaggatttacagccaatacacttttgctgattgacctgaatgctgtcatcaacgtggctgattgcgccattagggcagctacgggcgcagggcgcatcttcacaatggtgacaggtcactgcactacgttgctgctgatgtttgataaccgtaattcggggatgaaaatggtgttggctcaggacatgttgctcatcattgtgagccatgacacaggcgatttcacaagcatgacaacccagacattgctgactgttggccataataaaacgattcataacgaccttcttttttggttgtaaaaaccttattctttatatgagtgttgttattacccgacttacaggggaatcggcaatgttcatgtgcccagaataagtaactatttcgctataaactgtggcagatcaaataatcccatcactgactaaattgcgttttagcgaactggaacattaatgattttttgtggagaagacgcgtgtgattgttaaacgacccgtctcggccagtctggcccgggcctttttttacattgtgctgctgtcgattctttccacgggtatcgctctgctaactctggcgagcagtttgcgcgacgctgaggctatcaatattgccggatcgctgcgtatgcagagttaccgcctgggctacgacttgcaaagtggcagtccacaactcaatgcacatcgccagttgtttcagcaggcactgcattcatcggtattaaccaatctcaacgtctggtatgtgccagaagcagtaaaaactcgctatgcgcatctgaatgccaactggctggagatgaataatcggctcagcaagggcgatttgccgtggtatcaggccaatattaataattatgttaatcagatagacctgttcgtgctggctttacagcactacgctgaacgcaaaatgctgctggtggtggcgatttccctggctggcggtatcggtattttcacgctggtcttttttactttgcgccgtatacgccatcaggtggttgccccgctgaatcagctggttaccgccagtcaacgtattgaacacgggcagttcgactcgccgccgctggataccagtctgccgaatgagcttggtctgcttgcaaaaacctttaaccagatgtcgagcgagctgcataaattgtacctttcgctggaggcgtcagtagaagaaaagacccgcgatctccacgaggccaagcgtcgtctggaggtgttgtatcaatgttcgcaggcgctgaacacaagccagattgatgtgcattgtttccgccatattttgcagattgttcgcgacaatgaagcggctgaatatctggagttaaatgtcggtgaaaactggcggattagcgaagggcaaccaaacccggaattgccgatgcagattttaccggtgacaatgcaagagacggtttacggcgaactgcactggcaaaatagtcacgtttcatcatcagaaccgctgcttaacagcgtttcgtcgatgctgggacgcggtttgtactttaatcaggcgcaaaagcattttcagcagttattgttgatggaagaacgtgcaaccatcgcccgcgaattgcacgactcgctggctcaggtactttcttacttacgtatccagttgacgttactgaagcgttcgataccggaagataacgccaccgcacaaagtatcatggccgatttttcccaggcgttgaatgatgcttatcggcagttacgcgagctgttgactactttccgcctgacgctgcagcaggcggatctcccctccgcgttgagggaaatgctggatacgttacaaaatcaaaccagcgccaaactgaccctcgactgccgtctgccaaccctggcgctggatgcgcaaatgcaggtgcatttgttgcaaattattcgcgaagcggtgctgaatgcgatgaagcacgccaacgccagcgaaatcgccgtcagttgcgtcaccgcgccggacggcaatcacacggtttatatccgtgataacgggattggtatcggtgaaccgaaagaacccgaaggtcattatggtctgaatatcatgcgcgaacgcgcggaacggctgggtgggacgctgactttttcacaaccttccggcggcggcacgttagtgagtattagctttcgctctgcggagggtgaggaaagtcagttgatgtaatgcctcctactgaccaaagaatacttgcacttaaggttcagtataaaagggcatgataatttacattaactcctttttttctccacgattggctcgtaccttgccgctacagtgaagcaagtcaagcctacaacgatacgcagaaacacgaggtcctcttttaatggcgaatttctttattgatcgccccatttttgcctgggtgctggcaatcctgttgtgtctgacagggaccctggcgattttttcattgcccgttgaacaataccccgatctcgcgccaccgaatgtgcgagtgaccgctaactatcccggcgcatcggcccagacgctggaaaacaccgtgacccaggttatcgagcaaaatatgaccggcctcgataatctcatgtatatgtcatctcagagcagtggcatcggtcaggcatctgtcactttaagttttaaagcaggcaccgatccggacgaagccgtgcagcaagtacaaaaccagctgcaatcagccatgcgaaagttaccgcaggcggtgcaaaatcagggcgtgacggtgcgtaaaaccggcgataccaatattctgaccattgctttcgtctctaccgatggttcgatggataaacaggatattgccgattatgttgccagtaatattcaggacccgttaagccgcgtgaatggcgtcggggatatcgatgcctatggttcgcaatattccatgcgtatctggctggacccggcgaaactcaacagtttccagatgacggctaaagatgtcactgatgccattgagtcacagaacgcgcagattgcggttgggcaacttggtggtacaccttccgtcgataagcaggcgctcaacgccaccattaacgcccagtcactgctgcaaacaccagaacagttccgcgatatcaccttgcgggtgaatcaagacggctcagaggtaaggctgggcgatgtcgccaccgtcgaaatgggggcggagaaatacgattatcttagccgcttcaatggtaagccagcctccgggctgggggtaaaactggcctccggcgcaaacgaaatggcgacagcggagctggtgctcaatcgtctcgacgagctggcgcagtacttcccgcacggactggaatacaaggtggcgtatgaaaccacctcgtttgttaaagcctccattgaagacgtggtgaaaacgctgctggaagctatcgccctggttttcctcgttatgtatctgttcctgcaaaacttccgcgccacgctgatacccactatcgccgtgccggtggtgttgatgggaaccttctccgtactttacgccttcggttacagcgtcaacaccttaaccatgttcgcgatggtactggcgatcggtctgctggtggatgacgcaatcgtggtggtggaaaacgtcgaacgtattatgagtgaggaaggactcactcctcgcgaagccacacgtaaatcgatggggcagatccagggggcactggtcgggattgcgatggtgctttcggcggtatttgtaccaatggccttcttcggcggcaccaccggtgccatctatcgccagttctctattaccattgttgcggcgatggtgctgtcagtactggtagcgatgatcctcactccggctctgtgtgccacactacttaagccactgaaaaaaggtgagcatcacgggcaaaaaggcttttttgcctggtttaaccagatgtttaaccgcaacgccgaacgctacgaaaaaggggtggcgaaaattctccaccgcagcctgcgctggattgtgatttatgtcctgctgcttggcggcatggtgttcctgttcctgcgtttgccgacgtcgttcttaccgctggaagaccgtggcatgtttactacctcggtacaattgcccagcggttcaacccaacaacagaccctgaaagtcgttgagcaaatcgagaaatattacttcacccatgaaaaagacaacatcatgtcggtgtttgccaccgttggttctggccctgggggtaacgggcaaaacgtggcgcgaatgtttatccgcctgaaagactggagcgaacgcgacagtaagaccggcacctcgtttgccattatcgagcgtgcaacaaaggcgtttaacaagattaaagaagctcgcgttatcgccagcagcccgccagcaattagcggtcttggtagttctgcgggttttgatatggagttgcaggaccacgctggagcaggtcacgatgcgctgatggcagcacgtaaccagttgctggcgctggcggcggaaaacccggagctaacccgtgtgcgccataacggcctcgacgacagtccgcagttgcagattgatatcgaccagcgtaaagctcaggcgctgggcgttgctatcgacgatattaacgacacactgcaaaccgcctggggttcgagctatgtgaatgactttatggatcgcggtcgcgtgaagaaagtctatgtgcaggcagctgcgccgtatcgcatgctgccagatgacatcaatctctggtatgtccgaaataaagatggcggcatggtgcccttctctgctttcgcgacctcacgctgggaaacaggctcgccgcgtctggaacgctataacggttattctgcggttgagattgttggggaagccgcaccgggggtcagtaccggtacggcgatggatattatggaatcgttagtgaagcagctgccaaacggctttggtctggagtggacggcgatgtcgtatcaggagcgactttccggcgcgcaggctccggcgctgtacgccatttccttgctggtggtattcctgtgtctggctgcgttgtatgaaagctggtcggtgccgttctcggtaatgctggtcgtgccgctgggggtaatcggcgcgctgctggcaacctggatgcgcgggctggaaaacgacgtttacttccaggtgggcctgttaacggtcattggtttatcggcgaaaaacgccatcctgatcgtcgagtttgctaacgagatgaaccaaaaaggccacgacctgtttgaagcgacgctccacgcctgccgtcagcgtttacgcccgattctgatgacctcgctggcatttatcttcggcgtattgccaatggcaaccagcacgggtgccggttccggtggtcagcatgcggtgggtactggcgtaatgggcgggatgatttcagccactattctggctatttacttcgtgccgctgttctttgtgctggtgcgccgccgcttcccgctaaagccgcgcccggaataagcaataaaaaaggcgacatgccaatgtgtcgcctttttcaactttccgattaagaacctgctcagcgggttcttgctgtttatactttgtctcaggaattacttacgaagcataacttcgataaagtctttccagttccccagttcacgttcaatcataacaacctctcttataattatgggtattctacggaaacaatataccgtggtgaagctaatttactcgattgctgcgatgactacctccggggggacaaatcttatgtaaatactatggtcctgcggtgatgatttgtatgtgatacacagcaacatttcgagatattcatacggcatctaatactgatttaattcaggttaaaatacagacagataacaagatgaatattcttaatgtttacgttaaaaatgtttaatattatttaatagttgttaatttgaatacttcgataatgttatatttcctgataatcatttgcaggcaaaatgttttcacccttaaatgagtatttattctcataaatcgaaaaaggattcattatggttacactttacggtatcaaaaattgtgacaccattaaaaaggctcgccgttggctggaagccaataacatcgactatcgttttcatgattaccgcgtcgatgggctggacagcgaattattgaacggttttatcaacgaattaggttgggaggcgttactcaacacccgtggtacaacctggcgtaaactggacgaaaccacccgcaataaaatcaccgatgcggcctcagcggcggcattaatgactgaaatgcctgcaattatcaaacgtccattgctctgcgcgcccggtaagcctatgctgctgggtttcagtgattccagttatcagcaatttttccatgaggtgtagtctatgtcgtgcccggttattgagctgacacaacagcttattcgccgcccttccctgagtcctgatgacgcaggatgccaggctttgttgattgatcgtttgcaggcgatcggttttaccgttgaacgcatggactttgccgatacgcagaatttttgggcatggcgtgggcaaggtgaaacattggcctttgccgggcataccgacgtggtgccgcctggcgacgccgatcgttggatcaatccgccgtttgaacccaccattcgtgatggcatgttattcgggcgcggtgcggcagatatgaaaggctcgctggcggcgatggtggtagcagcagaacgttttgtcgcacaacatcccaaccatacgggacgactggcatttctgatcacctctgatgaagaagccagtgcccacaacggtacggtaaaagtcgtcgaagcgttaatggcgcgtaatgagcgtctcgattactgtctggtcggcgaaccgtcgagtatcgaagtggttggtgatgtggtgaaaaatggtcgtcgcggatcgttaacctgcaaccttaccattcatggcgtgcaggggcatgtggcctacccacatctggctgacaatccagtacatcgcgcagcacctttccttaatgaattagtggctattgagtgggatcagggcaatgaattcttcccggcgaccagtatgcagattgccaatattcaggcgggaacgggcagtaacaacgttattccgggtgaactgtttgtgcagtttaacttccgcttcagcaccgaactgactgatgagatgatcaaagcgcaggtgcttgccctgcttgaaaaacatcaactgcgctatacggtggattggtggctttccgggcagccatttttgaccgcgcgcggtaaactggtggatgcggtcgttaacgcggttgagcactataatgaaattaaaccgcagctactgaccacaggcggaacgtccgacgggcgctttattgctcgcatgggggcgcaggtggtggaactcgggccggtcaatgccactattcataaaattaatgaatgtgtgaacgctgccgacctgcagctacttgcccgtatgtatcaacgtatcatggaacagctcgtcgcctgatgagtggttctgcaagaggaaataagcatggactggctggctaaatattggtggattctggtgattgtctttttggtaggcgtcctgctgaacgtgattaaagatctcaagcgcgtcgaccacaagaaatttctcgccaacaagccggagcttcccccgcatcgtgatttcaacgataagtgggacgatgacgacgactggccgaaaaaggatcaaccgaagaagtaagctgagtgctcaaccgtaggccggataaggcgttaacgccgcatccggcaatggtgaacgatgcctgatgcgacgctcacgcgtcttatcaggccaggtaatctgtcttttacatcatttcaatcacatcatcatcgccaggcttaccgccacttagcgcttcgtcgaaataatgtttcggaatggtataacgcaagtgatccagggcaaattgcatactgcgattgtcgatcgcatggcctaaatcctccacgatatccagcgtcacgtcaccaccggcactgattaacgcttcctgcgccgcaaccgcatgcgccagatcgataaccggatcttcaccgccatgaatcaggtgaattgtcgtggctgtagacgcagtttccggcaggctcgcatagcgtccgttaaaagcaatgacgcgtgaagcaaggcccggttcggctttaatgctctccagcgccataatcgcgccttgagagaaaccgattagcgctgtggcgttagcccctactccgctctgtttctgccagtagcgcaccatctcaataaacgtcggcatgatggcatccacacgcgcctggcgattatcttccgtaataccctgcaccgaaaaccactgacgccccgccggattaccgctcggctccgcgcctccgacactcaccaccagcgcatcaggaaatagcggcgcaaaccagctgcctatttcccccattgccaccgggttatccccgacaccgtggaaaagcagtaacaactgttgcgcaggtttatccgggctttgaacaacaaaatggtcatgtttcatggcgaactccttaactgatgtcattaattttacgccgctgactcacaatgaccatgggagaaaattgaaggagtcagtgaaaaaattgccattgcgttatgcgatcgcgcagacgctcagtgcgaacctcattaagtgcgaacagcgcctgcgcggcctcttcccgctggcgaaccagtaacatcttgcggcctgaaagtttaagtgtggtacataactgcgcgtcactggtgtttttctgtaaacgcccacgcagcgccggtaatgccagttcactggtttgtagcagacgcaataagcaacctaacgacgttaatagcggacgatgagcgaaagcaaaaccggccagttcaagccagtcgtcgtcagaaaggacggcattgtttagtggatcaacaggaagcgtttcgccattccactgcgcgagagcttgcgcatcgcgacgtaaacggtaatgctcacgttcagccagctgtttacccgcatcactcatcggtaacagtgccatcgccgtatagcaaccgctgctggcttcacgatgattacccattcgcaccagcacaaaaccgcagcgttgccagaaacgccataactccccggtgtaaccaaaactcaccgaaagatagtcgaggccaggcctatattgcaaagcgctggcaatgagctgttgcccaacgccttcgcgctgacgcgccggatggactgcaatccggctgacccgccgtccgcgcaatgtcgccgccagtggattgctgccgtgcgccgccagcgactgggccaccagattaccccgcgggcgacgaaaacctgcccataccgcctgactgagttcttgagataatccgccctcatccaccagccacaacgccccggcaatctcgttttcgccagccgcctgtaaaaaatgttgccctggtgcatccatcatccggcgtaaatccagcggcgaggtccggtagtgcgcaccagacaataactgataaacctttaacggcgtttctggatcgcttcgccataacgtttgttcaaatgcggaaatgacgatattgccttgtggtgtatgggtgaagttttcatcgttaaaaaccagtgcctcactaaccattttttccagcgggcatccctgtgcccagcggatcggctgttgcagttcaaaacggtgtaaatgcggaaagcgagcgcaaaatttcagcaaaaaaccacgtccggtaccttcgtagccctgcaccgtagtggttaacaacgttcgaggaaaacgcgataccagttgatgcaacaacggcgcaggtatggctgcggcttcatcgaccaccagccagtcggcttgctcatcgctggctaacaaggcatccggcgcaataaagcgaaacttctcgcccgcaaattgtgccagtacatccgttgccgcttttgcgggcgcggtgacaatcgcactgcccgcaatacgagaaatgagttgccctgccagcgcggacttaccgcgcccacgcgcagccgttaccgctgccacgcccggcggcatggtcagtagctgctgtaagagttgctgttgttctggttgtggtgcgccggtcgcggggtgccagtcagtacggggggtaaaatgcgccaacgagaacggctggttttgccgccagagaatagcgtcgttatccgccgtaagtacgcgtttgagatgctggacaaaatgcggcgtcgcaatagggtcagggcaatcactccagcgcagcgagtcggcatcaggttggttttcccactcttcccatacagggagtaacaaaaccagccagcttcccgctttcaacgttccgctaagtgccgcaaaggcagcggcatcaaagccgtggcgggcgtcgaataccgcatgccggaactcgcgcccaagtaaagtttgtagcgccgagggagaacagtggttttcagcatctggctgcggcgaaatccacagccagtcgccaggtaaggcatcacgcaacttaagcgcatgatcaaaacaccaaccctcttccccgctcaacaccagcaagcggcggatcccttcacgtttcatttgcgctgttaatgtgtgaagcgcagtcagttcagccatccttgccccggaagttaaatgcttttaccaaaagtattgcattgtgccggatcgccgctgtcgaaaccacgtttaaaccagctgtagcgttgctgagaagtaccatgagtgaaactgtctggtactactcgcccctgactttgctgttgtaaacggtcatcgccgatggcctgcgccgcgttcagcgcctcttccagatcgccttgctgctgcatgttatgcccccagacaccggcaaaacagtcggcctggagttccatacgcacagataagcggtttacttccgcctgcgtcgcgttttgttgcagttgacgaactttcggctcgatgcctaacaatttctgcacatgatgaccgacttcatgggcgataacgtacccctgggcaaaatcgccatccgcgccgagtttgtctttcatgtcatcatagaaggagagatcgatataaaccgtgccatccgccgggcaatagaacggtcccataatggactggcccgccccgcagccggtacgcgtcattccacgatacatgaccagcttcggttgctgataggttttacccatcttctcgaattgctgtccccaggtgtcttccgtggttgccagaatcaccgaggtgaattttgcggcttcgtcttcatttgggctaattgaccgtgttgattgctgttgggaaaccggctgtccggtcatcaacccggttaaatcaacaccatagtagcctgcaaccagcacgactatcagtaaaatcagcccgcctttaccgcttggcaggcgaaaaccgggaccgcccattgacggaccgccggagctgttacgcctgtcttcgacattgtcactttcacgtcgcccttgccaacgcatagatacctcaacaatatattcattatagaaatgatcgtaggtggttcagaggaagattaccacaggaaagcgggatgaaatggcggaggaatgagcgttcaatgcatatattccgagagcggttgtcttgccgtgccagctgcacggcaagatgatgaacagaaaaatcagtccagctgtacacccaggcggcgggcgacggcttcataggcttcgatcaggccaccgaggctctggcggaaacggtctttgtccattttctccagtgtttctttgtcccacaggcggctgccgtccggggagaactcatcgcccagtaccacttcacctttgtacagaccaaactccagcttgaagtcgaccagaatcagaccagcatcatcgaacagttttttcagcacgtcgttcgctttgtaggtcagctctttcatacgcgccaggttctctttgctcacccagccaaaggtttcgcagtaagattcgttgaccatcggatcgtgcatggcatcgtttttcaggaacagatcgaacagcggcgggttcagctcaataccttcttcgattccaagacgtttcaccagagagcccgcagcacggttacgcacgacacactcaaccggcaccatatccagctttttcaccagacattcggtatcggagagcagacgctccatttgagtcgggatacccgcttcagccagtttgctcataatgaagtagttgaacttgttgttcaacatacctttgcgatcaaactgctcaatgcgcgcgccatcccctgctgacgtatcattgcggaattcgagcaccaacaggtccgggttttccgtgctgtatacggttttcgctttaccacgatacaactcagcttgcttttgcatctttatcactcctgggtgtgaattaacgttttaaaatcttttgctgtctggtgtgccggatgttttgtcggatgcggcgtgaacgccttatccgaactacgtccgacaaacaaatttcgtgcgaattaccgctaaaatcgcgttttcctgccgacgcacacgtttgcgtatcatatcagaaaaaagggccggatgattccagccctgtatttttacttgctaaacgcagcctggaagacagctaccagcgcgtcgttctgactctgagtcagagtatgacctttcggatcgatgaactgtaggctgctgcggttatctaaatcgccaacctgcagtttatagtcaccggatgccaggcctggatcgctcgcgcccagttcctgccagtcgctgtcagacagcggcttataagttacggccatgttgccctgcgaacgggtgctgtcggtcactttcatgcccactttttccagcgccgctggcagacgttgccaaaccacattgaacggcccgcgtacgaccagcattggtaaaccggtgtcatcagctgcactttgtacgtccatagtggtggaggcacgattttgcgcagcgttcgcggcgtcagtggcagatttatccagaccggcggaaataacgttcatcatctccgtgctgtaacgctgcatggaagccgcgtctgcaaccggtttgcccgcctgttccaggttcaacagtttaaccgtaaccgcctgctgataaccctgcggcttaacagagatttgataacgaccacgatactgctcgtcttcgtccagacggttccattgtacccaatcggtggtcagtgtctgaccagcatcatcacgttgggtgatggtgtagtttttcgcctgcagcacgctaaccacctgcggccacagagtattgccacgaccattttccaccagcaatgaagcggtatcgcccgtgaactgggtacgcgcgccagaaaccagtgccagcggctgggctggtggacgaatgtccagcgccttaccgacagcaccactaccgttggtcaccgggattgcataatcaccggaggtcaccggcaaaatcattccagccggggcatgaagctccgcaagcggtgccgcttccaggtaggcttcatcaccactgacctgacgcttatagcgtgagtcagaactacaggcagcgagtaataaaacaagcgaaacacccgcaacctttgccaggcgcgacttttgaacagagtaagccatcaaatctccctaaactttacagcaaaccggcatgcttaagcgccgctctgaccgtctcacgaccactgtcggtgattggtgtcattggcaggcgcagcgtatcggtcgccacaagacccagttccttacatgcccatttcaccgggattggattgggttcgacaaatagtttgttgtgtaatggcatcagacgctgattaataacgcgtgcctcggcaaaatgcccttctgctgccagtttgcacatctgggccatatcacgcgctgcgacgttagccgtaacggaaataaccccatgaccgcctaattgcatgaagtccagcgcgctcgcatcatcgccgctcagcagaacaaaatcatctgaaaccagctctttgatctggtttacacgcgttaagttccctgttgcctctttgattccgataatattttttactttcgccagacggcccaccgtttccgggagcagatcgcagccagtacgggacggcacattatacagaatttgcggcaggtcagtatgctcagcgatggctttgaaatgctgatacaaaccttcttgcgacggacgattgtagtaaggggttaccgtcaggcagccgacgataccactgtcattgaagcgctgcgtcaggctaatggcttccgcagtagcgttagcgccggtcccggcaattaccggaatgcgcccatcagccagctccagcgtcatcatcaccacatcagcatgttcgtcatgatttaaggtagcggactcgccagtggtgccaacagaaacgatcgccgaagtaccgctggcgacatgataatcaatcagttttttcaagctagcccgacagacattacctttttcatccatcggagtaacaatcgcgacaatacttcccgtgaacatgggccatcctctgtgcaaacaagtgtctcaatggtacgtttggtatggcattaaaagcaagcagacagaaccgttctgattgttgtatgcatgttttttttatgctttccttaagaacaactcaccccttaaaggaataaccagtttgacactgtcatcgcaacattatctggtgatcactgcattgggtgccgatcgccctggaattgtgaacaccatcacccgtcatgtcagtagttgcggctgtaatattgaagacagtcgcctggcgatgctgggagaagagttcacgtttatcatgctgctttccggttcatggaatgccattactctgattgaatcaacgttaccgttgaaaggtgccgagctggatcttttaatcgtgatgaagcgcacgacggcgcgtccgcgtccgccaatgccagcatctgtctgggttcaggtcgatgtggcagactccccgcatttaattgaacgcttcacagcacttttcgacgcgcatcatatgaacattgcggagctggtgtcgcgcacgcaacctgctgaaaatgaacgggctgcgcagttgcatattcagataaccgcccacagccccgcatctgcggacgcagcaaatattgagcaagcgttcaaagccctatgtacagaactcaatgcacaaggcagtattaacgtcgtcaattattcccaacatgatgaacaggatggagttaagtaatgaatccactgaaagccggtgatatcgcaccgaaatttagcttgccggatcaagacggagaacaagttaatttgaccgacttccagggacagcgtgttctggtttatttctacccgaaagccatgacccccggctgtaccgtacaggcctgcggcttacgcgataacatggatgagttgaaaaaagcgggcgttgatgtgctgggtatcagcaccgataaacccgaaaaactctcccgttttgcggaaaaagagctgcttaactttacgctcctgtctgatgaggaccaccaggtgtgcgaacaattcggcgtctggggtgaaaagtccttcatgggcaaaacctacgatggcattcatcgcatcagcttcctgattgacgctgatggcaaaatcgaacatgtctttgacgatttcaaaaccagcaatcaccacgacgttgtgctgaactggctgaaagaacacgcctgattactttgctccattccgtgctggctgcgcttgcggccagcatacctcacttctcgtgatcaagatcacattctcgctttcccctgcgacacgggtgtcgaatccattttttgctgaacgttaatgaccatcatttttgtaccgttcagaatccagttaatacataacttattgaatatattgagttaatcagaatggcatcctttatgcaatatgaaatgcaatgtttcatatcattttcaaggagccgacatgaaccgctttgtggtggccgaaccactgtggtgtacaggatgtaatacctgtctcgctgcctgttcggacgtgcataaaacgcaaggtttacagcaacacccgcgcctggccctggcgaagacgtcaacactcactgcccctgtcgtgtgtcatcactgtgaggaagccccttgcctgcaggtctgcccggtcaatgccatctctcagagggatgatgcgatccaactcaacgaaagcctctgtattggctgcaagctttgcgccgtggtctgcccatttggcgcaatcagcgcttcaggaagccgtccggtgaatgcccctgcgcaatatgtttttcaggctgagggctcactcaaagacggcgaagaaaacgtgccgccccaacatgcgttgctgcgctgggaaccgggtgtccagaccgtcgcggtgaaatgcgacctgtgtgatttcttgccagaaggtccggcctgcgttcgcgcttgcccgaatcaggcgttacggctgatcaccgacgatagcctgcaacgccagatgaaagaaaaacagcgccttgccgcaagctggtttgccaatggcggggaggatcccctttccctcactcaggagcaacgctaatggatgccctgcaattattaacctggtcgctgatcctctatctgtttgccagtctggcttcgctgtttttactcggtctggacagactggctattaagctttccggcatcacatcgctggtaggcggcgtgattggcatcatcagcggaattacgcaattacatgcaggcgtaactttagtcgcccgttttgccacgccttttgaatttgccgatttaaccctgcgaatggatagcctctcggcatttatggtgctggttatctccttgctggtggtggtttgttctctctattcattgacttatatgcgcgaatacgagggcaaaggcgcggcggcgatgggcttctttatgaatattttcatcgcatcgatggttgccctgctggtgatggacaacgctttttggttcatcgtgctgtttgaaatgatgtcgctgtcttcctggtttctggtcattgccaggcaggataaaacgtcgatcaacgctggcatgctctacttttttatcgcccacgccggatcggtgctgataatgatcgccttcttgctgatggggcgcgaaagcggcagcctcgattttgccagtttccgcacgctttcactttctccggggctggcgtcggcggtgttcctgctggcctttttcggttttggcgcgaaagccgggatgatgccgttgcacagctggttgccgcgcgctcaccctgccgcaccatcgcacgcttcagcgttgatgtctggcgtaatggtcaaaatcggtattttcggcatcctgaaagtggcgatggatctgctggcgcaaacgggtttgccgctgtggtggggcattctggtgatggcgatcggcgcaatctccgcgctcctgggcgtgctgtatgcactggcggaacaggatatcaaacggctgctggcctggagtaccgtcgaaaacgtcggcattattttgctggcggtcggtgtggcgatggtcggtctgtcactgcacgacccgctgctcaccgtggttggactgctcggcgcactgtttcatctgctcaaccatgcgcttttcaaagggctgctatttctcggcgcgggtgcgattatttcgcgtttgcatacccacgacatggaaaaaatgggggcactggcgaaacggatgccgtggacagccgcagcatgcctgattggttgcctggcgatatcagccattcctccgctgaatggttttatcagcgaatggtacacctggcagtcgctattctcactaagtcgtgtggaagccgtagcgctacaacttgcgggtcctattgctatggtaatgctggcagtcactggtgggctggcagtaatgtgcttcgtcaaaatgtacggtattactttctgtggtgcgccgcgcagcacacacgctgaagaggcacaggaagtgccaaatacgatgatcgtcgccatgctactgctcgcggcactctgcgtattaattgcgcttagtgccagttggctggcaccgaagataatgcacattgcccatgcgtttaccaatacccctcccgtcactgtcgccagcggaatagcacttgtacccggcacgtttcatacacgggtcactccttcattactgttgctgttactactggcgatgcctttgctgcctggcctttactggctgtggtgtcgttcgcgccgcgcagcgtttcgtcgcacaggagatgcctgggcatgcggctacggctgggaaaatgcgatggccccgtcaggcaatggcgtgatgcagccgctgcgtgtggtcttttctgcgctatttcgtctacgacaacagctcgaccctacgctgaggctaaataaaggtcttgcgcacgtcaccgccagggctcagagcacagaacccttctgggatgagcgggtgatccgccccatcgtgagcgccacccaacggctggccaaagaaatacagcatctgcaaagcggcgactttcgtctctattgcctgtatgtggtcgccgcactggttgtgctgctaatcgctattgccgtctaaggaaatcaccatgagacaaactctttgcgacggatatctggtcatttttgcgttagcacaggccgtgattctgctgatgctaaccccactttttacgggtatttcccggcagatacgcgcgcgtatgcactcccgccgcgggccggggatctggcaggattatcgcgatatccacaaactgtttaaacgccaggaagatgcgccgacatcttcaggtctgatgttccgcctgatgccgtgggtattaatcagcagcatgctggtgctggcgatggccctaccactatttattaccgtttccccttttgcgggcggcggcgatctgatcacccttatctatcttcttgccctgtttcgttttttctttgctctttcagggctggataccggaagcccgtttgcgggagtcggtgccagtcgcgagttgacgctcggcattctggtcgaacccatgctcattctctcactgctggtattggcgctgatagcaggttccacgcatatcgagatgatcagcaatacgctggcaacgggctggaactcgccgctaaccaccgtactggcgttactggcctgtggttttgcctgcttcattgagatgggaaaaattccctttgatgttgctgaagcagaacaggaattacaggaaggcccgctgaccgaatattccggtgccgggctggcgctagcgaaatgggggctggggctgaaacaggtcgtgatggcagcactgtttgtggccctgtttctgccctttgggcgcgcgcaagaactttctctcgcctgcctgctgacttcacttgtcgttacgctgctcaaggttttgctgatttttgtactggcctcaatcgcagaaaacacgctggcacgcgggcgttttttactcattcaccatgtgacctggcttggcttcagccttgctgcgcttgcatgggtcttctggttaaccggtctgtaaggagcactgacggaatatggaaaatcttgctctgacgacgttaatgctgccttttatcggcgcactggtcgtttcgttttcgccacaacgtcgggccgccgaatgggggttttgttcgccgcactgaccacgctgtgcatgttgtcgctgatctccgcgttttatcaggccgataaagttgccgtcacgttgacgttggtcaacgtgggggatgtggcattgtttggcttggtcattgatcgcatgagtacgctgattctgtttgtggtggtgtttctcggtttgctggtcacgatctactccacgggttatctgacggataaaaatcgcgaacacccgcataacggcacgaatcgttattacgcatttttgctggtgtttatcggcgcgatggcgggactggtactctcctcgacgctgctcggtcagttgttgttttttgaaattacgggcggctgctcctgggcgttgatcagttattaccagagcgataaagcacagctttcagcactaaaagcgttacttatcactcatatcggctcgttggggttgtatcttgccgccgccacgctgtttttgcagaccggaacgtttgcgcttagcgcgatgagcgagttacacggcgacgcacgttatctggtttatggcggcatcctgtttgccgcgtgggggaaatcggcccagctaccgatgcaagcgtggctaccggatgcaatggaagcgccaacaccgatcagtgcctatctccacgccgcatcgatggtgaaagtgggcgtttacatttttgcccgcgccattatcgacggcggcaatatcccgcatgtgattggcggcgttggcatggtcatggcgctggtcaccattctttatggctttctgatgtatttgccacagcaggatatgaagcggttgctggcctggtcgaccatcactcaacttggctggatgttcttcggcttgtcgctctccatcttcggctcgcggctggcgctggagggtagcatcgcctacatcgtcaaccacgcgttcgctaaaagcctgtttttccttgtagcaggtgcgctgagttacagctgcggcacgcgcttgttgccgcgtctgcgtggcgtattgcacaccctgccgttgccaagcgtgggtttctgcgtggcagcgctggcgattaccggtgtgccgccgttcaacggcttcttcagtaaattcccgctgtttgccgtcggttttgcgttgtcagtggagtactggatcctgctgcccgccatgattctgctgatgattgaatcggtcgccagtttcgcctggtttattcgctggtttggtcgcgtcgtgccgggcaaaccgagcgaggccgtcgccgatgccgcaccgctgccagggtcaatgcgcctggtgttgattgtactgattgtgatgtcgctgatttccagcgtaatcgccgcgacctggttgcagtaaggagatgatgaatgaccggttctatgatcgtaaataatctggcgggactgatgatgctgacatcgctgtttgtgattagcgtcaaaagctatcgcctgtcatgcggattttacgcctgccagtcgctggtgctggtgtctattttcgccactctctcgtgcctgttcgccgcagagcaactgctgatctggtccgccagcgcctttatcaccaaagtgctgctggtaccgttaatcatgacttacgctgcacgaaatattccccagaacatcccggaaaaagcgttattcggtccggcaatgatggcactgctcgcggcgttaattgtcctgctttgcgcatttgtcgttcagcccgtgaagctaccgatggctaccgggctgaaaccggcgctggcggtagcgttaggtcattttctgcttggcctgctgtgcattgtcagccagcgcaatatcctgcggcaaatttttggttactgcctgatggaaaacggctcccatctggtgctggcgcttcttgcctggcgagcaccggaactggtggaaataggtatcgctaccgacgccatcttcgccgtcattgtgatggtgttactggcaagaaaaatatggcgtacccacggcacgctggacgtgaacaacttgaccgcgctgaagggataatgagatgagttattctgtgatgttcgctttactcctgctcacgccgctgcttttttcgctgctctgttttgcctgccggaaacgggggctctctgcgacttgtacggtgactgtattacatagcttagggatcacactgctgctgattctggcactctgggtggtccaaactgccgctgatgcaggagaaatattcgctgcgggactgtggcttcatattgatggtctgggcggtttgttcctcgccattcttggtgtgattggctttctcaccggtgtttactcgattggctacatgcgtcatgaagtggcacacggcgagctttcacccgttacgctgtgcgattactacggtttcttccatctgtttttgttcaccatgctgctggttgttaccagcaataacctgattgtgatgtgggcggcgatcgaagccaccaccttaagctcggcgtttctggtaggcatttacggtcagcgttcatcgctggaatcagcatggaagtacatcattatttgtactgttggtgtcgcttttggtctgttcggtaccgtgctggtatacgccaacgccgccagcgttatgccgcaggcagaaatggcgatattctggagcgaggttcttaagcaatcgtccttgcttgacccaacattaatgctgttggcctttgtgtttgtgctaattggctttggtaccaaaaccgggctatttcccatgcacgcctggctgccggatgctcacagtgaagcgccgagtccggtcagcgccctgctctccgccgtattgctgaactgcgcgctgttggtgctgattcgctattacatcattatttgccaagccatcggcagcgatttccccaaccggttgttgctcatcttcggcatgttgtcggttgccgtggcggcatttttcattctggtacagcgggacattaagcgtctgctggcgtactccagcgtggagaacatggggctggtcgcggtggcgctaggcattggcgggccgctgggaatttttgccgcgctgctgcacatcttaaaccacagtctggcaaaaacgctgctgttctgcggttccggcaatgtactgctcaagtacggcacgcgcgatctcaacgtcgtctgtgggatgctcaaaatcatgccatttaccgccgtgctgtttggcggcggtgcgctggcgctggcagggatgccgcccttcaacatttttcttagcgaatttatgaccattaccgccggactggcacgtaatcacctgctgattatcgtcctgctgttattgctgttaacgctggtgctggcgggcctggtacggatggcagcgcgggtgttaatggcgaaaccgccgcaggccgttaaccggggtgatctcggctggttgaccacctcgccaatggtgattctgctggtcatgatgctggcgatgggaacgcatattccacaacctgtcatcaggatcctggcgggcgcttccactatagtcctctcagggacgcacgacctgcctgcacaacgtagcacctggcatgattttttgccttcaggcaccgcatctgtttcggagaaacacagtgaacgttaattcatcgtcaaatcgtggcgaagcgattctcgccgccctgaaaacgcagttccccggcgcggtgctggatgaagagcgacaaacgcctgaacaggtcaccattacggtgaaaatcaatctgctgcctgacgttgtacattatctttattatcaacatgatggctggcttccagtcctgtttggcaacgacgagcggacacttaacggtcattacgcggtttattatgccctttcaatggaaggggccgaaaaatgctggatcgtggtgaaggcactggtcgatgccgacagtcgggagtttccgtcagtcacaccgcgcgtccctgccgcggtctggggcgagcgagaaattcgcgatatgtacgggctgattccggttggcctgccggatcagcgtcgcctggtgttgcccgatgactggccggaagatatgcatccgctgcgcaaagatgcgatggattatcgactgcgccctgaaccgacgactgataccgaaacgtatccgtttatcaatgagggcaatagcgatgcgcgggtgatccctattggcccgctgcatatcacctccgatgaaccgggtcacttccgcttgtttgtggatggcgagcaaattgtcgatgctgattaccgcctgttttatgtccatcgcggcatggagaaactggcagaaacgcggatgggctacaacgaagtgaccttcttatcggatcgcgtgtgtgggatttgcggttttgcccacagtgtggcctataccaactcggttgaaaatgcactggggattgaggtgccgcaacgagcgcatactattcgctcgattctgctggaagtcgaacgtctgcacagtcatttgctcaaccttggcctctcctgccattttgttggatttgataccggctttatgcaatttttccgcgtgcgggaaaagtcgatgacaatggcggaattgctgaccgggtcgcgtaaaacctacggtctgaatctgattggtggtgttcgccgcgatattctcaaagagcaacgtctgcaaacgctgaaactggtgcgcgagatgcgcgccgacgtgtcggagctggtagagatgctgcttgccacgccgaatatggaacaacgcactcagggcattggcattctcgaccgacaaatcgcccgtgattatagccctgtagggccgctgatccgcggcagtggttttgcccgtgatttgcgctttgatcacccctacgccgactacggcaatattccaaaaacactgtttacctttaccggcggcgatgttttctcccgcgtgatggtccgtgtcaaagagacgtttgattcgctggcaatgctggaatttgccctcgacaacatgccggataccccactgctgaccgaaggctttagctataaacctcacgcattcgcgctgggctttgttgaagcgccacgcggtgaagacgtgcactggagcatgctcggtgataaccaaaaattgttccgctggcgctgccgtgccgccacctacgccaactggccggtgttgcgttacatgctgcgcggcaataccgtttctgacgcaccgctgattatcggtagccttgatccctgctactcctgtaccgaccgtgtgacgctggtagatgtgcgcaagcgccagtcaaaaaccgtgccgtataaagagatcgaacgctacggcattgatcgtaaccgttcgccgctgaagtaaggacagaagatgctgaagttactgaaaactattatgcgcgccggaaccgcgacggtgaaatatcccttcgcgccactggaggtcagcccaggctttcgcgggaaaccggacctgatgcccagccaatgtattgcctgcggcgcctgtgcttgtccggcaaatgcgctgactatccagaccgacgaccagcaaaattcgcgcacctggcagctctatctgaggcgttgtatttactgcggacgttgtgaagaagtgtgcccgaccagagccatccagcttaccaataactttgaactgaccgtcaccaataaagccgatctctatacccgcgcgacgttccatctacaacgttgcagccgttgcgaacgcccgtttgccccgcaaaaaaccgtcgcactggctgctgaattgttggcacagcaacaaaatgcgccacaaaaccgcgaaatgttatgggcgcaagcgagcgtctgcccggagtgcaaacaacgcgcgacgctgctcaacgacgatacagatgtaccgctggtggctaaggagcagctatgagtccagtgcttacacaacatgtcagccagcccatcacgctggacgagcaaacgcaaaagatgaagcagcatttgctacaggatatccgtcgctcggcttacgtttatcgcgtcgattgcggcggctgcaacgcctgtgaaatcgaaatttttgccgccatcacaccagtattcgacgcagaacgttttggcattaaggttatttcatcaccgcgtcacgccgatattttgttatttacaggcgcagtcacccgggcgatgcgtatgcctgcacttcgggcgtatgagtctgcccccgatcataaaatttgtgtttcctacggcgcgtgcggtgtcggcggcggtattttccacgatctctacagcgtctggggcggcagcgacaccattgtccccattgatgtttggatccccggctgcccgccaacaccggccgccaccattcacggtttcgccgtggcgctcggtttgctgcaacagaagattcacgcggtggattatcgcgatcccaccggggtgactatgcaaccgttgtggccgcagatcccgccatcacagcgtatcgccattgagcgagaagcgcggcggctggcgggctatcgtcaggggcgagaaatttgcgatcggctcctgcgccatttaagcgacgatcctacaggaaatcgggttaacacctggttgcgcgatgccgacgatccacgtctcaatagtatcgttcagcaactctttcgcgtactccgggggttacatgactgaagagtgcggggaaattgttttctggacgctgcgaaaaaagtttgtcgccagtagcgacgagatgccggaacacagctctcaggtaatgtattactcgctggctatcggtcatcacgttggcgtgattgattgtctgaatgtcgccttcccctgcccactgacggaatacgaagattggcttgcactggtcgaagaggagcaagcccgacgtaagatgctgggggtgatgacttttggtgagattgttattgacgccagccacaccgccctgttgacccgggcattcgcgccactggcggatgacgcgacgtctgtgtggcaggcgcgtagcattcaattcattcatctgttggatgaaattgtgcaggaaccggccatctatctgatggccagaaaaattgcgtgagaaggatttctcattaataaggactgttgatggctatgtcagacgaggcgatgtttgccccgccgcaaggaataacaattgaagcggtaaacggaatgctcgcggagcggttagcgcagaaacacggtaaggcgtctttattacgcgccttcatcccgctgccgccgccgttcagcccggtacaacttattgaactgcatgttctcaaaagcaacttctattaccgctaccatgatgatggcagcgatgtgacggcaacaacagagtatcagggcgagatggtcgattattcgcgtcacgccgtccttctcggcagtagtggaatggcggagctacgctttattcgcacccacggctgccgttttactccccaggattgcacactgtttaactggctggcgcggataatcaccccggttctgcaatcatggctcaatgatgaagaacagcaggtggcgctgcgtttgctggagaaagatcgcgatcatcatcgggtactggttgatattactaatgcagtgctgtcacatcttgatctcgacgatctgatcgctgacgtcgctcgtgagatccatcattttttcggtctggcttcagtcagtatggtactgggcgatcatcgaaagaacgagaagtttagcctgtggtgcagcgatctttctgcctcacattgtgcgtgtctgccacgcaatatgcctggcgacagtgtattgctgacacaaacgctacaaacccgacaaccgaccttgacgcaccgtgcagacgatctgtttctctggcaacgcgacccgttattactcttacttgcatctaacggctgcgaatctgcgctccttataccgcttacctttggcaaccatacaccgggtgcattgttgctggcgcatacctcttccactctctttagtgaggaaaactgtcagctactacaacacatagccgatcgcatcgctattgccgttggcaatgccgatgcctggcgtagcatgaccgatttgcaggaaagtttgcagcaagaaaaccaccagcttagcgagcagctcctttcgaatctgggcgtcggtgacattatctatcaaagccaggcaatggaagacctgctccagcaggtagatattgtggcgaagagcgacagtacagtgttgatttgtggtgaaaccggaaccggcaaagaggtgatcgccagagcgatccatcaacttagcccgcgacgcgacaagccgctggtcaaaatcaactgcgctgccatccccgccagtcttctggaaagtgagttattcggtcatgacaaaggggcgtttactggtgcgattaatacccatcgtggtcgttttgaaattgccgatggcggcacgttgtttcttgatgaaattggcgatctgccgttagaacttcagcctaaactgctgcgcgtattgcaggagcgggagattgagcgtctcggcgggagtagaacgatcccggtgaatgtcagagtcattgccgccaccaaccgtgatttgtggcaaatggttgaagatcgccagtttcgcagcgatctcttttatcgcctgaatgtcttcccactggaattgccgccgctacgcgaccgtccggaagatatccctcttttagcaaagcatttcacgcaaaaaatggcgcgccatatgaatcgttcaattgacgccatcccgaccgaggcgctacgccagttgatgtcgtgggactggccgggcaacgtgcgcgagctggaaaacgtgattgagcgagcggtactgctgactcgcggtaacagtctgaatttacatcttaatgtccgacaaagccatttactgccgacgctaaatgaagattcagcgcttcgcagttcaatggcgcagttgctgcacccgacgacgccagagaatgacgaagaagaacgtcagcgcattgttcaggtattgcgagaaaccaatggcattgttgccgggccccgtggcgcggcgacacgattagggatgaagcgcaccacgctgctgtcacgaatgcagcgtctggggctctcggttcgcgaggtgttgtaatctgcttttgcaggagtatgcatgagaaacaaactctctttcgacttgcagttgagcgccagaaaagcggcaatcgctgaacggattactgcccataaaattgcccgcagcaaagtgtcggtctttttaatggcgatgtccgctggcgtgtttatggcgattggatttactttttacctttccgttatcgccgatgccccgtcttcacaggcattaacccatctggtgggcggcctttgctttacactcggctttattttgctggcggtttgtggcaccagcctgttcacctcgtcggtaatgacggtgatggcaaaaagtcggggcgttattagttggcgaacttggctgattaacgcacttctggtggcctgcggtaatctggcaggtattgcctgtttcagtttgttaatctggttttccgggctggtgatgagtgaaaacgcgatgtggggagtcgcggttttacactgcgccgagggcaaaatgcatcatacatttactgaatctgtcagcctcggcattatgtgcaatctgatggtttgtctggcgctgtggatgagttattgcgggcgttcattatgcgacaaaatcgtcgccatgattttgcccatcaccctgtttgtcgccagtgggtttgagcactgtatcgccaatttgtttgtgattccgttcgccattgccattcgccatttcgccccgttactttattcgtaccccttataatggggtgttagccagccagacccggcatgattactgcccccagtcgtccatgatccggggggtgatgtcaccgggtctggtggggcgctggtaaccgctaataggggtcaggtcaggcacttttgccgggaccgtctgtaacgtggatgccggtacctgctccccgtggttatctggttaacccatatacaagggagacagaatgaccgaatccagcgattacgaatccgtccaggtctttatcggcgttgatgtcggtaaagatacgcatcacgctgttgccattaatcgttcaggtaaacgcctgttcgataaagcattacccaacgacgaaaacaaactcaggtcgctaatatctgacctgaaacaacatggtcagatactgctggttgttgatcagccagctaccatcggtgcgttacctgtcgccgttgcccgctcagaaggagtccttgtcggatacctccctggactggccatgcgccgcatagccgacttacacgccggtgaagctaaaactgatgctcgtgacgctgccatcattgccgaagctgcccgtaccctgcctcacgcgctacgcacgctgaaactggctgacgagcaaatcgccgaactctccatgctctgcggcttcgatgatgatcttgccgcacagacaacgcaggccagcaaccgtatccgcggccttctgacccagatacatccggcactggagcgcgttctcggtccgagacttgagcacccggcggtactcgatcttctccagcgatatccctcaccagaaaaactcgcttcgctgggcttcgctgggtgagaagaagctggcagcccagctctgcaaacttgcgcctcgtctgggtaaacgccttgcagcagacatagctcaggcactggccgaacaaaccgtcgtcgttcccggcacgaatgccgctgccgtagtactgccacgtctggcactccagctcatcacgctgcgtaagcaaagagacgaggtggcgcttgaggtagaacagcgagttcttgctcaccctctttacccggtcctgaccagtatgcccggagtcggtgtcaggaccgcagccagactcctcaccgaggtcgcctgccgcgccttcgcctctgccgcacatctcgctgcttatgctggccttgcgccggtaactcggcgatccggctcgtcaatacgcggtgagcatccctcgcgacggggtaataaagctctcaaacgggcgttgttcctgtcggccttcgccgcgctcagggatccgctctccagggcttactacacccgcaaaatgagtcagggaaaacgacacaatcaggcgcttatcgccctggcgagacgacgctgcgacgttctgttcgccatgatgcgcgacgggactttttataccccgcaggggtcataacatgcttgacaacttaataggggcaccccccttctggcaactggcgcacagtagcgcagacaattttccggcactgacggtaagccattttattaccgccaatctgctcccggtgatgctgggtaatattatcggcggtgcagtgctggtgagtatgtgttatcgggctatttatttacgtcaggaatcctgaaaaatcagcccggcgaaacagttcgtcgggctgaagattattcttgcgctatttgcccatcgggccaggcgtggatcacggctttgatcagcgtcgccaatggaatagcgaagaatacgccccagaatccccacaaaccaccgaagatcaccaccgataaaataatcaccagcggatgcaggttaaccgcttcggagaacaacaccggtactaacagattaccgtccagcgcctgaataatcagatacactgcgaagcagctccagaattccgtgcctgcaccaaactggaatagcgccacgccaaccaccggaatggtcaccacaaatgcgccaatgtacggaataagtaccgagaagccgaccagcaccgccagcagcagcgaatagttcagcccaaagagcaagaaccccagccaagtggcgatccccaccacgatcatctccagcactttgccgcggatatagttggtgatttgttgattcatctccttccacacctgtcctgccagtccacggttgcgcggcagcacccgacgaacggcgttcagcatctgctctttgtctttcagcaggaagaagaccatcaatggtaccagcaccagatagacggcaatggtcagcaaaccgaccagcgaggcgagggaaattttcaccaccgaatcgcccatggtcagcatccgactgcgcatattttcggccattgcatcaataatgcccgcgtccattaatgccggatagcggcgcggcaacgtggcggcaaagtcagaaagcttattgagcatccccggcatatcgcggatcaagtagatgccctgttgccaggcgataggcagtaccacgaacgccatcagtagcaatataccgacgaaaaccaccaatacaatcgacgtcgcccagcggcgggagcagccaatagattgcaggcgcacggttggccattccagcaaataggccagcacaatagccaccagcaacggagcaagcaggccactaaagaaaaagataatgccaaatccggcaactaaaataaccagcaaggcaatcgcttccgggtcgctaaaacggcggcgataccattgcatcaacatttcgagcataaagaccttccctgaacctcaagagcgggattgcgatccgcaattgtatcgaaatgtcacaaaaaagacttcgctttttatgacggattcaggaaactgaaaagtcatttgagtgggctaatcttcgccgttacactcaaaggcggcgcggtgggaacaatatttcacagtatcggtcaaatgactatcttcagaaatacaggatagaggttatgttcaggcagttgaaaaaaaacctggttgcaaccctcattgctgctatgaccattggtcaggtagccccggcgtttgccgacagcgcagacaccttgccggatatgggaacctccgcaggaagcacgctttccattggtcaggaaatgcagatgggcgactattatgtccgccagctacgcggcagcgcgccgttaattaatgacccgctgttaacgcaatatattaattcgctggggatgcgtctggtttcgcatgccaattcggttaagacaccgtttcatttttttctgatcaacaacgacgaaattaacgcctttgctttctttggcggcaacgtggtgctgcactctgccctgttccgttattccgataacgaaagtcaactggcttcagttatggcgcacgaaatctcccacgtcacccaacgtcacctggcgcgagcgatggaagatcagcagcgcagcgcgccgctgacctgggtcggcgcgttaggttctattttactggcgatggccagtccgcaggcggggatggcggcgctgaccggtacactggcgggaacgcgtcaggggatgatcagtttcacccagcaaaatgaacaggaagcggaccgcattggtattcaggtgctgcaacgctcgggattcgatccgcaggcgatgccaaccttcctcgaaaaattactcgatcaggcgcgttactcctcgcgcccgccggaaattttattgactcacccgttgccggaaagtcgtctggcagatgcccgcaaccgtgctaatcagatgcgcccgatggtggtgcagtcgtcggaagatttctatctggcgaaagcgcgcacactggggatgtataattccggacgtaaccagctcaccagtgatttgctggatgaatgggcgaaaggaaacgttcgtcagcaacgagcggcgcaatatggtcgtgctttacaggcgatggaagccaataaatacgacgaggcgcgtaaaacgctgcaaccgttactggcggcagaacctggcaacgcatggtatctcgatctggctaccgatatcgatcttgggcaaaacaaagccaatgaggcaatcaatcgcctgaaaaatgcccgtgatttgcgcaccaatccggtgttgcagctcaacctggcaaacgcttatctgcaaggcggtcaaccacaagaagcggccaatattctgaatcgctacacctttaataataaagatgacagcaacggctgggatttactggcacaggcggaagccgcgctaaataaccgcgatcaggagctggctgcgcgagcagaaggttatgcgctcgccggacgactcgatcaggccatttcgctgttgagtagcgccagttcgcaggtgaaattaggcagccagcaacaagcgcgttacgatgcgcgcatcgaccagttgcgccagctgcaggaacgctttaagccttataccaagatgtaattcgcattaaaggaagaacaatgaccaaacaggtaaaaatctaccataacccacgctgttcaaagagccgggaaacgctgaacctgctgaaaaaaaacggcgtggagccagaagtggtactctaccttgagacacccgccgatgcggcaacgctgcgcgatttgctgaaaatgctggggatgaatagcgcccgtgaattgatgcgccagaaagaggatctttataaagaactgaacctggctgacagttcgcttagcgaagaggcgctgattcaggcaatggtggataatccgaagctgatggagcgcccgattgtggtcgcgaatggcaaagcgcggattggtcgtccaccggagcaggtactggaaatcgtgggttaagatgtgccccatcgctagttgaagcacattgccggatgcgacgcttgccatgtcttatccggcctacgaatactatggattaacttcgcgtagttcggataaggcgttcgcgccgcatccgacaataaacaccttatctacaacttcagaatttctttcacaaacggaatggtcagcttacgttgcgcggtaatcgacgcacgatccaactgatccaacgtcataaatagcgtgcgcatttctctgtcgagccgcttcagcaagaaacgccccacatcttccggcagttcaaaaccacgcaaacgcgcgcgtaactgtagcgcctgcaacttatcttcatcagaaagtggctgcaatttgtagatctgcccccagtcgagtcgcgacgcgagatccggtaatcccagattcaactgccgcggtggacgatcgccggtgatcaacaatcgtgttttgcccgattccagaattcgattgtagagatcgaaaatcgccatctcccacaactcatcgcctgcaatacactcaatgttgtcgatacagaccagcgacaaatgctccataccgtcgagcacttccggaacaaaccaggtgcgtttatccagcgggacatagcccaccgcatcgccacgctgcgacaattccgcgcaagccgcgtgcagcagatggctgcgccccgcgccttcgcgtgcccagagatagatgtaaccgctatgttcctgacgcagcacgttttgcagcgcagccagtaaagaggagttatcccccggccagaaacttgcaaaggtttcgtcgtcaggaagataaagtggcaaagagagctgtgccggtgtgttcagagatacctcaaccaggatttcacaaaatcgcgagaagtttaccacagaatcccatgatgtttgaaccgggcagcaacactgcccggtcggtacattatttgtctgttatatccgcgtcttctgcgtccagcaccacttcttcagggcgcagcacactaatcagtttgaagatcaaacttaagccgataccgacgatggtcgccagcgccatacctttcagctccgccgcgccaatgtttaccttcgcgccactgacaccgatgatcaaaatcacggaagtcaggatcaggttctgtgctttgttgtaatccacttttgattcgatcaaaacacgaataccggaagcaccgatgacaccataaagcagcagcgaaacgccgcccatcaccggcaatgggatcatctggatagcggcagccagtttaccgacgcaggaaagcaggatagcgaaaatcgccgccccaccgataacccaggtactgtaaacacgggtgatcgccatcacgccaatgttttctccgtaagtggtatttggcgtagagccaaagaagccggagatcacagtcgacaggccgttagcaaacatcgaacggtgcagacctggatcgcgcagcagatcttttttgacgatattagccgttactaccaggtgccctacgtgttcggcaataaccactaacgccgctggcagaatagtcagaatggcaaaccactcgaagcgcggcgtatagagggttggcagcgcaaaccagtgagcattaataatcggcgtggtatcgacaattcccattgcgaaagagagcgcgtaccccaccagcacgccaattaaaatcgggataattgccaggaaaccacggaacagcacggaacctaaaaccgtgaccgccagggtggtaatagagatgatgatggttttggagtctggcgtttgcccttcagccgggagtaaacccgccataccggcagctacgcccgccagctccagaccgatgacggcaacgattgcgcccattgccgcaggtggaaacagcacgtccagccagccggtccccgctttcttcacgataaaagaaaccaggcagaacagcacgccgcacataataaagccgcccagcgcgacttcataccctaacggcaacagtaacaataccggtgaaataaaggcaaagctggaaccaagataagccggaattttccctttacagatgaagagatacagcagcgttccaataccgttaaataacagtacagtcgccgggttaatatgaaataagacgggcaccaggacggttgcaccaaacatggcgaacaaatgttgcaaactaagcgggattgtctgtaaaagtggcggtctttcactcaccccgatagcacggcgcgtcatagtattatcctctgtattatgtgttataggcgctttactcaaaaaaaagccgactcttaaagtcggctttaattatttttattctttatttcgtaccaaagattttgtcaccggcatcgccgaggcccggaataatgtatccgtgctcgttcagtccctggtcaatcgatgcggtatacagttcgacgtccgggtgcgctttttccagcgcagcgataccttctggcgcagctaccagcaccagaactttgatgctgctgcagcccgcttttttcagcaggtcgatggtcgcgataacggaaccaccggttgccagcattgggtcaacgatcagcgccatacgctcatcgatgttagaaaccagtttctggaagtacggtaccggctccagcgtttcttcattacggtacataccgacaacgctgatgcgcgcgctcggaacattttccagcacaccgtccatcatccccagaccggcacgcagaattggcacaacggtaattttcttacctttgatctggtcgatttctaccgggccgttccagccttcgatagttactttttccgtttcgaggtcggcggtcgcttcgtaagtcagcaggctacccacttcggaagcgagttcgcgaaagcgcttggtgctgatatcttgctcacgcatcagtcccagcttgtgtttgacgagtgggtgtttgacttccacgatcttcatactctttctcctttgaggggcagccacaaaaaaaatcgacggattatacctcctttcttcaaggcggcaatattcttttcgttgactttagtcaaaatgataacggtttgagataaagttattttatattcaaatggttatgaaagaagattattccatccgaaaactaacctttgccctggcacaagtcttctttcgccgcgcgtctggggaaaagacgtgcaaaaaggttgtgcaaagcagtctcgaaaacgtttgctttccctgttagaattgcgccgaattttatttttctaccgcaagtaacgcgtggggacccaagcagtgaccgataaaacctctcttagctacaaagatgccggtgttgatattgacgcgggtaatgctctggttggaagaatcaaaggcgtagtgaagaaaacgcgtcgtccggaagtgatgggcggtctgggcggcttcggtgcgctgtgtgcattgccgcaaaaatatcgtgaacccgtgctggtttccggcactgacggcgtaggtaccaagctgcgtctggcaatggacttaaaacgtcacgacaccattggtattgatctggtcgccatgtgcgttaatgacctggtggtgcaaggtgcagaaccgctgtttttcctcgactattacgcaaccggaaaactggatgttgataccgcttcagcggtgatcagcggtatcgcggaaggatgtctgcaatcgggctgttcactggtgggtggcgaaacggcagaaatgccggggatgtatcacggtgaggattacgatgtcgcgggtttctgcgttggcgtggtagaaaaatcagaaatcatcgacggctctaaagtcagcgacggcgatgtgctgattgcactcggttccagcggtccgcactcgaacggctattcgctggtgcgcaaaattcttgaagtcagcggttgtgatccgcaaaccaccgaacttgatggtaagccattagccgatcatctgctggcaccgacccgcatttacgtgaagtcagtgctggagttgattgaaaaggtcgatgtgcatgccattgcgcacctgaccggcggcggcttctgggaaaacattccgcgcgtattgccagataatactcaggcagtgattgatgaatcttcctggcagtggccggaagtgttcaactggctgcaaacggctggtaacgttgagcgccatgaaatgtatcgcaccttcaactgcggcgtcgggatgattatcgccctgcctgctccggaagtggacaaagccctcgccctgctaaatgccaacggtgaaaacgcgtggaaaatcggtatcatcaaagcctctgattccgaacaacgcgtggttatcgaataatgaatattgtggtgcttatttccggcaacggaagtaatttacaggcaattattgacgcctgtaaaaccaacaaaattaaaggcaccatacgggcagttttcagcaataaggccgacgcgttcggccttgaacgcgcccgccaggcgggtattgcaacgcatacgctcatcgccagcgcgtttgacagtcgtgaagcctatgaccgggagttgattcatgaaatcgacatgtacgcacccgatgtggtcgtgctggctggttttatgcgcattctcagcccggcgtttgtctcccactatgccgggcgtttgctgaacattcacccttctctgctgccgaaatatcccggattacacacccatcgtcaggcgctggaaaatggtgatgaagagcacggtacatcggtgcatttcgtcaccgatgaactggacggtggcccggttattttacaggcgaaagtcccggtatttgctggtgatacggaagatgacatcaccgcccgcgtgcaaacccaggaacacgctatttatccactggtgattagctggtttgccgatggtcgtctgaaaatgcacgaaaacgccgcgtggctggatggtcaacgtctgccgccgcagggctacgctgccgacgagtaatgccccgtagttaaagcgccagctctgccgctggcgtttttcaattcacctgtaaatcgcaagctccagcagtttttttcccccttttctggcatagttggacatctgccaatattgctcgccataatatccaggcagtgtcccgtgaataaaacggagtaaaagtggtaatgggtcaggaaaagctatacatcgaaaaagagctcagttggttatcgttcaatgaacgcgtgcttcaggaagcggcggacaaatctaacccgctgattgaaaggatgcgtttcctggggatctattccaataaccttgatgagttctataaagtccgcttcgctgaactgaagcgacgcatcattattagcgaagaacaaggctccaactctcattcccgccatttactgggcaaaattcagtcccgggtgctgaaagccgatcaggaattcgacggcctctacaacgagctgctgctggagatggcgcgtaaccagatcttcctgattaatgaacgccagctctccgtcaatcaacaaaactggctgcgtcattattttaagcagtatctgcgtcagcacattacgccgattttaatcaatcctgacactgacttagtgcagttcctgaaagatgattacacctatctggcggtggaaattatccgtggcgataccatccgttacgcgctgctggagatcccatcagataaagtgccgcgctttgtgaatttaccgccagaagcaccgcgtcgacgcaagccgatgattcttctggataacattctgcgttactgccttgatgatattttcaaaggcttctttgattatgacgcgctgaatgcctattcaatgaagatgacccgcgatgccgaatacgatttagtgcatgagatggaagccagcctgatggagttgatgtcttccagtctcaagcagcgtttaactgctgagccggtgcgttttgtttatcagcgcgatatgcccaatgcgctggttgaagtgttacgcgaaaaactgactatttcccgctacgactccatcgtccccggcggtcgttatcataattttaaagactttattaatttccccaatgtcggcaaagccaatctggtgaacaaaccactgccgcgtttacgccatatttggtttgataaagcccagttccgcaatggttttgatgccattcgcgaacgcgatgtgttgctctattatccttatcacacctttgagcatgtgctggaactgctgcgtcaggcttcgttcgacccgagcgtactggcgattaaaattaacatttaccgtgtggcaaaagattcacgtatcatcgactcgatgatccacgctgcgcacaacggcaagaaagtgaccgtggtggttgagttacaggcgcgtttcgacgaagaagccaacattcactgggcgaagcgcctgaccgaagcaggcgtgcacgttatcttctctgcgccggggctgaaaattcacgccaaactgttcctgatttcacgtaaagaaaacggtgaagtggtccgttacgcacacatcgggaccgggaactttaacgaaaaaaccgcgcgtctttatactgactattcgttgctgaccgcagatgcgcgtatcaccaacgaagtacggcgggtatttaactttattgaaaacccataccgcccggtgacatttgattatttaatggtgtcaccgcaaaactctcgccgtctgttatatgaaatggtagaccgcgaaatcgccaacgcgcagcaagggctgcccagtggtatcaccctgaagctaaataaccttgtcgataaaggcctggttgatcgtctgtatgcggcctccagctccggcgtaccggttaatctgctggttcgcggaatgtgttcgctgatccccaatctggaaggcattagcgacaacattcgtgccatcagtattgttgaccgttaccttgaacatgaccgggtttatatttttgaaaatggcggcgataaaaaggtctacctttcttccgccgactggatgacgcgcaatattgattatcgtattgaagtggcgacaccgctgctcgatccgcgcctgaagcagcgggtgctggacatcatcgacatattgttcagcgatacggtcaaagctcgttatatcgataaagaactcagtaatcgctacgttccccgcggcaatcgccgcaaagtacgggcgcagttggcgatttatgactacatcaaatcactcgaacaacctgaataaccctatgccaatacacgataaatcccctcgtccgcaggagtttgctgcggtcgatcttggttcaaacagttttcacatggtcatagcccgtgtggtagatggtgccatgcagattattggccgcctgaaacagcgggtgcatctggcggacggcctggggccagataatatgttgagtgaagaggcaatgacgcgcggtttgaactgtctgtcgctgtttgccgaacggctacaagggttttctcctgccagcgtctgtatagtcggcacccatacgctgcgtcaggcgctgaacgccactgactttctgaaacgcgcggaaaaggtcattccctacccgattgaaattatttccggtaatgaagaagcccgtctgatttttatgggcgtggaacatacccaaccggagaaaggtcgcaaactggttattgatattggcggcggatctacggaactggtgattggtgaaaatttcgaaccgattctcgttgaaagccgccggatgggttgtgtcagctttgcccagctttacttccctggcggggtcatcaataaagagaattttcagcgcgctcgtatggcggcagcacaaaaactggaaactttaacctggcaattccgtattcagggctggaacgtggcaatgggcgcttccggtaccataaaagccgcccatgaagtgttaatggaaatgggcgagaaagacgggataattaccccggaacgtctggaaaaactggtaaaagaagttttacgtcaccgtaatttcgcatcgctgagtttaccgggtctttccgaagagcggaaaacagtcttcgttcctggactggcgattttatgcggtgtgtttgatgctttagccatccgtgaactgcgcctttctgacggggcgttacgcgaaggcgtactgtacgaaatggaaggacgtttccgtcatcaggatgtgcgtagtcgcaccgccagcagcctcgccaaccagtatcacatcgacagcgaacaggcccgacgggtgctggataccactatgcaaatgtacgaacagtggcgggaacagcaaccgaagctggcgcatccgcaactggaggcgctactgcgatgggccgccatgctgcatgaggtcgggttgaatatcaaccacagcggtttgcatcgccactccgcttatattctgcaaaacagtgacttgccgggttttaatcaggaacagcagctgatgatggcgacactggtgcgctatcaccgtaaagcgattaaactcgacgatctgccgcgctttaccttgtttaagaagaaacagttcctgccactgattcagctattgcgccttggcgtattactcaacaatcaacgtcaggcaaccaccacaccgccaacattgacactgattactgatgacagtcactggacactgcgtttcccgcatgactggtttagtcagaatgcgttggtactgcttgatctggaaaaggagcaagaatactgggaaggcgtggctggctggcggttgaaaattgaagaagaaagtacacctgaaatcgccgcttaatgctttgcgggccgacgagaaatgtcggcccgcattattcaggcactttcgcgaatgggttcgatttcattcaacgtatcaattaacggctgcggcttaccaataagataaccctgcatataatcgatccccaaagagagcaccgcctcgcggatctcttcgttttcaacgtactctgccactacccgcattttcttcattcgcgccagatggcaaatcgacgccacaatctgataatccagactatttgacacaatattgcggataaagctgccgtcaattttaagcagatcggcattcacatttttaagccgtgcatagctggcgtagccggtgccgaaatcatcaatcgcaatctggcagcctaattcctgaagatgctgcaaggtgatttgcgcctgcttaacattggtcagagcattactttcggtgacttcaaaaataagttgccacgcttcaatctgatatttagccagcaactgactgacttcaacaggaaaacgagcctgacataccgaggttggagacagattaatagcaaaacggtgagcgggcatcttcgctctgttttcagccataaattgcagcgtatgctcaatgacccacatgtcgatactcgacgataaaccaaattcgtgcgcgaccggcaagaagctatcggggacgatcagttcatcattctcacctttcatgcgcagaagaatttcatggtaaacatcaccacgcataccggtaatcggctgggccatcaggaaaaaatggttgtgttccagcgcctgctgtagtcgattcatcatcgcgactttatctttcaattcgcgttgcaaatacattgccccgcgacgctgcatattttccggggcgttggtcacgatggaaagttcggcgaccgtatttagctctcccagcagcaggtagatatgattcactggcgagcgcacatagcagtaactgacgccaatctgcggttgcatcggcatcccatcccaaaagaaacgaaattgcttgagatgactatccagtgcggtaatgcgctcctggtgcgattctgtattcagtcgcagcgcgagatcgttacccgaaagctgataaacatcttcacccggttccagcaagggtgacagccagtgagaaagtttttgcttgtattgaatccgcagcatgatgccatagttcttaaccagcatttccatgccagggatgcgtaaataacaaagcgcagaccagggagcatcacgcaacgcgcgattcagggcgcgaacatttggcagatgaaccaccgggtccatatacgcaagccgctgaatgcgtctgactaccgctctctgacgggttgccagtacagccatataattgacaataaaagagaataccagataactggaggaggttatggtcagctgcgtggtatagccaggataaatgggaatgtaattttgatagctgtggatgctgatcatcaacacgaccgcccagagcagcgaaatcagcttataaccatagcgcatcgctccccacatcatcaggggcagcaataatgacaaggtataattggtgctaaaaattgtgcttttttcatttaacggcatgcataacagcaacaataaagcacctaatgccagtagccagagcgcgaactcttttttggtgactttggcatcaacctgctgttttaattgcgaataatagctacgtaaataaaatggatttcgcactacccgaatgatgaagtagcacagcgggacaccgatcagattacccaccagtaaggcctgataattgattaaagtcccgaggttaaaaggcatgacaccgaccagattttctctgctcgccagtaatcctacaaatgcagcaaactggaaaagtatcagaaacagcgttgcaggaaacacaatctgccagaatatacgctgggaaattaaacgggtatcaccatgtgaaacgttgttacgccggggagtaaagaccctgtaaccgccccaacagagaatgataatgataataaaattagccgttaatgatagcgtttcgtaaaaacccagctctgcatatttgcggacaaaaatccctaaggcgatccctggcaatgccgcccagctgaaaaacatcatcatgctgatcatcagtgccagaggcagataaaagagaaaaacctcaccggaagaaatatgcgcgaaagtattaatgtgggcgaaaatgggcaagattaaagaaggcaggaacagcggaagcccccaccatttatcacgcatttttatataagttgcattcagtttcatagatgctcagcagaatcccccacatcctgaaggaggtgtattcagacaggcatcccacctgacttcgaatgatgattattcatcactatagagagcattgattctaagtgtcatatgaaagttccaattgatatatatcaaacaaaataaccctgattaatgaattattacgtttatcatgttaattcatcattattacatcatcattgtaaataattaaattaacttccataacattaaaatatgtatccactgacgtttttttacataacgaagaattgaccattttgtcctgttgtgccttaatgtaagtaccgtccacagcgtgggacatacttcaaggaaccttttgtgagtcaggcaaccagtatgcgaaaacgacaccgatttaacagtcgcatgacccgtatcgtactgctcatcagctttatcttcttctttggccgttttatctactcgtccgtcggtgcctggcagcaccatcagagcaaaaaagaagctcagcaatccacactctccgtcgaatcaccggtacaacgttagcggttaccttcttcactttcacagaacataacggcacttcgctgtcggatgcttttgctctttgggattatcaaagcggcagatattctttcatcttaaattttacgtctttgtcctgactgatgtttatcctgtttggctgcggaataaatataaaattaatatatatgttgtaatgatatatttttataaattattccctgcgtgaattttaataaatttaatctatccctttatacgcaatacatttactttcctcttttgatgatcttaaatgtcttatttttcgtaatgtgtataacaaggaatagtgatgaaatttaaaaaatgtcttctgcctgtggcaatgttagcgtcattcactctggcaggatgccagtcaaatgctgacgatcatgccgccgatgtttatcaaaccgatcaactgaataccaaacaagaaactaaaaccgttaatattatttccattcttcccgcaaaagttgccgtagacaactcccaaaataaacggaacgcacaagccttcggcgcgcttattggcgcagtcgctggcggtgttatcggccacaacgtcggttctggcagcaattccggaacgacggcaggggcagttggcggcggagctgtaggcgcggcagcgggttctatggtgaatgataaaaccttagtggaaggtgtttctttaacatataaggaaggcaccaaagtgtatacctccacccaggtgggtaaagagtgccagtttacgacaggtttagccgttgttattaccacaacgtataacgaaacgcgtattcagccaaatactaaatgtcctgaaaagagctaataatcaggaggagtcatgaagaaagtttttctttgcgccatcttagcctccttaagctatccggctatcgcctcatcattgcaggatcaactctctgctgtcgcagaagcggaacagcaaggtaaaaatgaagagcaaaggcagcatgacgaatgggtcgcggagcgcaacagggaaatccagcaagagaagcaacgtcgcgcaaatgcccaggccgccgctaacaaaagagcggcaacggcagcggcaaataagaaagctcgtcaggataaactggacgccgaagccactgcggacaaaaaacgcgatcaaagttatgaagatgagctacgcagcttagagattcagaaacaaaaactgacgctggcgaaagaagaagcccgcgttaagcgagaaaacgaatttatcgatcaggaactgaagcacaaagctgcgcaaaccgatgtggtgcaatctgaagctgacgccaacagaaatatgactgaaggcggtcgcgatctgatgaaaagcgtgggcaaagcagaagagaacaaatcggacagctggtttaattaatcgatgttagtaacttcaagcctatgattcttgaagataaaaaaccctctgtagtaacagagggttttgttcattcatagtgcagggattaaaatcattcccactcaatggtagctggcggcttgccgctgatgtcatacaccacgcgggaaataccgttcacttcattgataatgcggttggaaacgcgaccgaggaaatcgtacggcagacgcgcccagtgtgcggtcataaagtcgatggtttcgacagcacgcagagagacaacccagtcatacttacgaccatcgcccattacgccaacggaacgtaccggcaggaacacagtgaacgcctggctgactttgtcgtacaggtccgctttacgcagttcttcaatgaagatggcgtcagcacggcgcagcaggtcacagtactctttcttcacttcacccagcacacgaacgccaaggcctggtcccgggaatgggtgacggtacaacatgtcgtacggcaggcccagctccagaccaatcttacgcacttcgtctttgaacagctctttcagcggttcaaccaggcccatcttcatctctttcggcaggccgcccacgttgtggtgagatttgatgacgtgtgctttaccggttgcagacgccgcagattcgataacgtcagggtagatggtgccctgcgccagccacttcacgtcttccagtttcagcgcttcttcatcgaatacttcaacgaaaacgcgaccgatgattttacgttttgcttccggatcgttttcgccagccagcgctgacaggaagcgatcttctgccggaacgtgaacaatgttcagaccaaagtgatcgccaaacatatccagaacctgctctgcttcgttgagacgcagcaggccgttgtcgacgaatacgcaagtcaggtttttaccgatagcgcggtgcagtagcattgcggttacggaggaatccacgccaccagagaggccgaggatgactttatcgtcgcctacctgctcacggatgcgggctacagcatcgtcgataattttcgctggcgtccacagggcttcacactggcagatatcacgcacaaaacgctccagcatgcgcataccctggcgggtgtgagtcacttccgggtggaactgtacgccatagaagcgtttttcttcgttagccataatggcaaacgggcagctttcggtgctggctacggtgacgaagtcggacgggatagcggtaactttatcgccgtggctcatccagacatcgagcagcggtttaccgtctgcggtcagcgcatcttcgataccgcgaaccagtgcactgtcgtttacgacttcaacctgcgcgtagccaaattcacgttcgttagaggcttcaacgtgaccgcccaactgcattgccatggtctgcatgccatagcaaacgccgaataccggtacgcctgcttcaaagacatactgcggcgcacgcgggctgttttcttcagtagtactttccgggccgccggaaagaataatgccgcttggattgaagtcacgaatttgtgcttctgtcacatcccacgcccacagttcgcagtaaacacccagctcacgcacgcggcgcgcaaccagttgagtgtactgagaaccgaagtccagaatgaggatgcgatgcttatgaatgttttccgtcattgacgcttattccgaggcaagtgaaacagataatataaatcgcccgacatgaagtcgggcgaagagaatcaggagcccagacggtagttcggggactctttagtaatggtcacgtcgtgaacgtggctttcctgaatgcccgcaccgctgatacgtacaaactccgctttagtacgcagttcgtcgatagtaccacagccggtcagacccatacaggagcgcaggccgcccatctgctggtgaatgatctctttcaggcgacctttataagctacgcgaccttcgataccttccggcaccagtttgtcggcagcgttatcgctctggaaataacggtcagaggaacctttggacatcgcgcccagggaacccataccacggtaagatttgtaagaacggccctggtagagttcgatttcacccggagattcttcagtacccgccagcatggaacctaccatcaccgcgcttgcgccagcggcgatagctttggcgatgtcgccggagaagcgaataccaccatctgcgataaccggaataccggtgccttccagggcttcaactgcgtcagcaacggcagtgatctgcggaacacctacgccagtaacgatacgagtcgtacagatagaaccagggccgataccgactttaaccgcgctgcaaccagcttctgccaaagcgcgtgcacctgcagctgttgccacgttgccgccgatgatttgcagatccggatatttagcacgggtttcacggatacgctgcaaaacgccttctgagtgaccgtgggaggagtcgatcagcagaacgtcaacgccagcggcaaccagcgcgtcaacacgctcttcgttacccgcacctgcgccaactgcagcaccaacacgcagacggccttgctcgtctttacaggcgttcggtttacgttccgctttctggaagtctttcacggtgatcatgccgatcaggtggaattcgtcatcaaccaccagcgctttttcaacgcgtttttcgtgcatttttgccagcaccacttcacgggcttcaccttcacgcacggtgaccagacgctctttcggcgtcatgtaaacgctaaccggctggttcaggtcggtaacaaaacgcacgtcacgaccggtgataatacccaccagttcgttttcttcggtaacgaccggatagcccgcaaaaccgttacgctcggtcagttctttcacttcgcgcagcgtcgtggttggcagaacagtctgcggatcagtcaccacaccagattcgtgttttttcacacggcgaacttcttctgcctggcgttcaatggacatgtttttgtggataaagccgataccgccttcctgagccagagcaatagccaggcgcgcttccgttacggtatccattgctgcggaaagcatagggatattcagacgaatagttttcgtcagctgggtgctgaggtcagcagtattcggcagaacggtagaatgagcaggaacgaggagaacgtcgtcaaacgtcagagcttctttagcgatacgtagcatgggcaatatctcgaccagagtggttaataaatattgccgcggcattatacagagcgtaaccgattgcatctacccctttttgcaaaaaatgcttgctatccccgaagggcgggttactatcgactgaataacctgctgatttagaatttgatctcgctcacatgttaccttctcaatcccctgcaatttttaccgttagtcgcctgaatcaaacggttcgtctgctgcttgagcatgagatgggacaggtttggatcagcggcgaaatctctaatttcacacaaccggcttccggtcactggtactttacactcaaagacgacaccgcccaggtacgctgcgcgatgttccgcaacagcaaccgccgggtgaccttccgtccacagcatggacaacaagttttagttcgcgccaatattacgctctacgagccgcgcggtgactaccagataatcgttgagagtatgcagccggccggtgaagggctgctgcaacagaagtacgaacagctcaaagcgaagttgcaggctgaaggtttgttcgatcagcaatacaaaaaaccacttccctcccctgcgcattgcgttggtgtgatcacctcaaaaaccggtgctgcgctacatgatattttgcatgtgttaaaacgtcgcgatccttctctaccggtgatcatctaccccaccgccgttcagggcgatgacgcaccggggcaaattgttcgcgccattgaactggcgaatcagcgcaatgagtgcgacgtgttgatcgttgggcgcggcggcggttcgctggaagatttatggagttttaacgacgaacgcgtagcgcgggcgatttttgccagccgcattccggtcgtcagcgccgtcgggcatgagacggatgtgaccattgccgattttgttgccgatctgcgtgcgccaacgccgtctgccgccgctgaagtagtgagccgtaatcagcaagagttactgcgccaggtgcaatcgacccgtcaacggctggagatggcgatggattattatctcgccaaccgcacgcgtcgctttacgcagatccatcaccgattacagcaacagcatccgcagctccggctggcacgccagcaaaccatgcttgagcgcctgcaaaagcggatgagctttgcgctggaaaatcaacttaagcgtaccgggcaacagcagcagcggttaacacagcggctgaatcagcaaaatccacagccgaagattcatcgcgcgcaaacgcgcattcagcaactggaatatcgtttagcagaaaccctgcgcgtacagcttagcgccacgcgtgaacgtttcggtaatgcagtaacgcacctcgaagccgtaagcccactgtcaacgctggcgcgtggatacagcgttactactgctactgacggcaatgtactgaaaaaagtgaagcaagttaaagcgggtgaaatgctaaccacacgtctggaagacggctggatagaaagtgaagttaaaaacatccagccagtaaaaaaatcgcgtaaaaaggtgcattaagccagcacgaattcaacgcgttttttcgatatcaagccatgcccgtgctgacagaagtaatctactgcaccgcaggcttttaacacctgcaacggttgatggcagtctggacaaagagctttcatttcaataatttccccgcaggatgggcaacgcgcatggccgttatcctgatcaagcacatgctgacattgtggacaatgcagttccatatgaattcctccggtagccatccctctacattcatagagggaatggcagataaaatacttacggataattatttatttttcttgatgtgcttcatcagacgcttacgtttacgcatctgggttggcgtcagggtgttacgcttgttcgcatacgggttttccccttctttgaactgaatacgaatcggcgatcccattacgtccagcgatttgcggaagtagttcatcaagtagcgcttgtaggaatcaggcaggtctttcacctgattaccgtgaatcaccacaatcggcgggttataaccaccagcgtgggcatatttcagcttcacacgacgaccgcgtaccagcggcggttggtgatcttcaacagccatcgtcatgatgcgcgtcagcatagaggtccccacacgacgggtggagctgtcatacgcttcacgtactgattcaaacaagttaccaacaccactgccgtgcaaggcagagataaagtgcacacgagcaaaatcgataaagcccagacggaagtccagcgtttctttcacctgctctttcacttcctggctcaggccatcccacttattcaccacaatgacaagtgagcgcccactattgagaataaagcccagcagcgagagatcctgatcggaaataccttcgcgcgcatcaatcactaacatcaccacgttggtatcttcaatggcctgcaacgttttgattacggagaatttctctacagcatcggtgattttgccgcgtttacgtacgccagcggtgtcaatgagcacatactcacgtccatcgcgttccattggaatgtagatactgtcacgcgtcgtgccaggcatgtcataaacaacaacgcgctcttcaccaagaatacggttagtgagtgtagacttacctacgttcggacgacccacaatcgccagtttgatcggcagactttgcgggtcgaagtcgtcttcctcttcttcttcgccgttctcttccgcttcaaattgcgcccagtattcagcgtcttcgtcgacttcctcttgcggtgcgagatcttccatccacggcagcagcacacgctccagcagacttaatacgccacgaccgtgagatgcggcgatcgggtagatttcacctaaaccaagcgagtagaaatcaaccactgcctgatcgggatccagaccgtcagttttgtttgccaccaggaaggtcggtttttcacgagagcgcagatgtttggcaatcgcttcatctgccggcatcaagcccgcgcgcgcatccaccataaacagtacgacgtccgcttcttcaatcgccagcagcgactgttccgccatgcgggtttctacaccgtcttctgtgccatcaatcccgccggtatcaatacagataaactcacggccttcaatttccgcacgaccgtacttacggtcacgagtcagacccgggaaatccgcaaccagcgcatctcgggtgcgagttagacggttaaataacgtggattttcctacgttagggcgcccgacaagcgcgaccacaggtaccatgtttaaagcctcatttttataaatcatcagacaacgcacgctatattcgcgtcgttgttaaaaacaggaaaacggcccctgtccaggagccgttttcaaagtgaacgacagagacgattaacgtgtaatagagtacacggttccgtcttttgcctggatcagcagtttgccgtcagcggcaaccggttcagtctggaaaccggaactatcaactttttgctgggcaacgaaacgaccatcttcgacgttaatccagtgcagataaccttcactgtcacctaccaccaggttgccattatacagcaccggcgaagtcagcaggcgatgcagcagatcgctttgtgtccacagcgtaacgccgccatcaatggtcaacgccatcacccggtcattttgatcgaccagatagatgcgattgccgtcgacgatgaaatcattcaccgaacccagttcgcgtttccacataatctgaccactgcgcagatcaagcgccgtcaggttaccattataggccagagcgaaaacaacgccgttaacaacgacgggagtcgtgtcaacatcgctcagacggtcaatttcggtagaaccggtcgcctgggaaatacgctgctgccaaatcatctggccctgttccatcagcactgcgctgacgcgaccattatcgccccccacgacggccgcaccaaaagccgttgccggcgcagactcgccacgcaaagagagcgaaggcatatcgaggttaactgtccatttgacagcgccgtcagcttcgttcagcgcttgtaactgaccgttactagtgtggattaacaccagaccgtcgctgaccaccgggcgagaaagtgcttcacccgcgactttagtttgccatgccacagtaccatcgctggtattcagcgcgtaaacctgcgccttttcgctgccaatgtagacatgcccaccagacacggtcacaccgccagaaagtaatgcaggctctttagagaaccagccatctttctcggccaggctgacagaccagatttctttgccatcatccgcattcagcgcttttaccaaaccagcgcggtccgctgcatagacaacgttgtccgccagtgccggatgaagattggaatagaagttgccaatgccgctaccaacggaagtgctccacgccgtggtcggcgtaaactggttttcaacggttggcaatggggacatctttaccacatcttcttcgctgttaaacagcgaacagccgcttaaaagggtaacggaaagcagtcctggcagcagtaatttacgcaattgcatcgggtccctctcagatggacaaattattaattttcatctgcatcatttcgctcagtgccggagtaacatcgcttttcacgcctgcttcccatgcactacgcgcaccttgcttatcacctttgctcaacaatgctttaccacgcaggtcggcaacaatggcagcccacccttcacctttgatggtatcaagggttttcagcgcggcatcagcctgcttgagctgtacctgaacgcgagcaagacgcagatttatcacggctttgagattttcatcactcgtgtctgccagcccctgttgtaactgggcggcagctttctctagttcatttttgtcaacaaattgctgcgcaagttccaaagaagccagcgcaccataagtatttttattttcagcagcaaatttttccgccgccgggatgctatccggtttgccttcgctcactgcggtaaccgcattttgataggcaagagaagcggagcgtgcagaatcaacctgatggctgttccagtagcgccagccaatcagtgcgccaacgcccaaaatcaccccaacagccagtgctttgccattttcagcaaaaaagcgtttaaccgcttctacctggtcgttttcgttctcgtaaatttccacgctgtccttctccttccttaacccagtaacgtgcgcaaatgcgcggctacgctatcctgcgcaactgccgtttgctcaccagagcgcaaatccttcactactgctgtgccgttagccacttcagactcacccagcaccacagcaacgcgggcaccccatttatcagcacgggcaaactgtttcttaaagttgccgccgccgtggttggtcatcaatttcacgcccggtaattcatcacgcagacgctcagctaatgccatagccgcagattgtgtatcagcacctgaagccaccaggtatatatcgacaacaggatcggctttaaattccggattaacggcctgtactaacaatacaagacgttcgaggcccatcgcaaaaccgactgccggtgttgcacgaccgcccagttgttccaccagaccgtcataacgaccgcctgcacacacggtgccctgggagccgaggctgttagtcacccactcgaaaacggtacggttatagtaatccagaccacgcaccagacgctggtttacggtgtaagcgatccccgcgctctcaagcagtttgcacagaccggcaaaatgctcacgagattcctcgtccagataatcacctaatgccggagcgtcgttgagaagcgcctgcacttccggattttttgaatccagcacgcgcagcgggttagtgtacatgcggcgtttgcagtcttcgtccagcttttctttatgctgctcaaggaatgccaccagcgcatcgcggtaattggcgcgtgcttccagcgaaccaatagagttcagctcaagagttacgtgttcgaagatacccagcgcacgccaccagcgggcagtgagcataatcagttcagcgtcgatatccggaccttgcagaccgaaaacttcgcagcccaactgatggaactgacgataacgccctttctgcggacgctcgtgacggaacatcggcccgatataccacagacgctgttcctgattgtacagaagaccatgctcgatgccggcgcgtacacagcccgccgtcccttcagggcgcagagtcaggctgtcgccattgcgatcctcaaaggtgtacatctctttttcaaccacgtcggtgacttcaccaatcgcacgtttgaatagcggggtctgctctacaatcggcaagcggatttcactgtaaccgtagctgccgagcacgtttttcagtgtgccttcaatgcgctgccagatggccgtttcgccaggcaggtaatcgttcatgccgcgaatggcttgaatgttttttgccacgtttattctctttctgaatataaaaatgaaccctcaacgcttccctcaatgtttcgggagccatgcgggttcaatcatacacgggaagcgaggcgcttcccatcacgttattatttttcaacctgctgaacgtcaattcgacgcgcttcgtccagctgactggctttcgcacgaatgcgtgcttccagctggtcgatcatatcgttgttgtccagacggtctttgcgcacgccatcttcatagaggccgcttttcttgttgccgccggtgacgccgagtgtagaaaccagcgcctcacctgggccattcaccacgcagccgataatcgaaacgtccatcggagtgatgatatcttccaggcgttgctccagcgcgttaaccgtaccgataacatcaaattcctgacgcgaacaggtcgggcaggcgatgaagttaatccctcgcgaacggatacgcagcgatttcaaaatatcgaaaccgactttgatctcttcgaccggatcggccgccagcgatacgcgcagcgtgtcgccgatgccttccgacagcagcagacctaaaccaatggcggattttactgccccgctgcgtgcaccaccggcttcggtgatccccagatgcagcggctgatcgatctgttttgccagcaaacgataagactcaacagcgaggaagacgtcagacgctttcacgctgactttgaactgatcgaagttcaggcgatcgagatgatcaacatgacgcatggcggattccagcaacgcctgcggcgtcggttcgccatacttttcttgcagatctttttccagcgatccggcgttaacgccaatacggatcggaatgtttttatcgcgcgcacagtcaaccaccatgcgaatacgctcttcattaccgatattgccagggttaatacgcagacaatcgacgccgtattccgctactttcagcgcaatgcgatagtcgaagtggatgtcagccaccagcggcacgttaacccgctgtttgatgagtttgaacgcttctgccgcgtccatcgtcggtacggagacacggacgatatcagcgccaacgcgttccagcgccttgatttgattgaccgttgcttcgacatctgtcgtacgcgtattggtcatggactgtacggcgatgggagcaccatcgccaatcggcacattcccaacgtaaatacgtgttgattttctacgttgaattggagcctggttatgcatgaaaaatctcccgcgttacccgtctgttactgcgccggtgattgttcggcattgagggtcagacgcgcaacctggttagttctgataaaacgactcagatcgacaggtttcccttgatactggatctgtactgcggctggcgcaccaattttcagtttatacggtgcctggccggttaaattcaaattaccgtctttacgctgcatcccgctaaacaattttttaccggtagcatcagtgacctccagccagcaatcggcagtaaagttcatcaccagcgcattcggatcagccgccggcgtggtcacgccagcctgatcggttggcaacggcgcagcaccatctggcgttgttgctgccgttggtaccggggtcgcggcggtatcaacatttgcctgcgaaggcgaaacaaccgcattctgttgcggatcaacagctggtgctggcgcagttacggcaggtgtttgcgtgttggttgcggtagtatccacagacgctggcggcgtggacgttgtagccgggtctgtagttgtcgacgtatttaacgggacactctgcccctgctcgctattactgctcagttctgccgaagattgatcggccatagtggtgatctcttcctgctgagctttgtggtcttgccaccaccaggcaccgctcaggccgataaccacaaacaacaccagccaggtgaaggtcatcagccagccatcacgttttttgcggcgtttaccgagggaaaaactctgcattggcgcaacttttgcagcccgtagtggagcctgcttttccagccctggcagcagttcttcttctggaatatgtaccagacgcgcataagagcggatatatccgcgcaggaatgttgaagcaagatcggcgggtgccttatcttcttcaatgtcgcgtaccgtggaaaccttcaggcaaagtcgctcggcaacggcctgctgactaagtcctagttgttcgcgagcattacgcaggcgagcgccggtagtaagtgcttcattttggtcgtgcgtggcttcagtattcattcgctgcaggtacgtttaaatgagaattgagatgccggtgaaccatcatgctcacccacaccgcgaaacatccgttaagttaaccgttatcatacagtataagaccgtctgtgtgctcgtgacaaagcccacattcactaaggctaacttactgttgcatcgttacatactgccttaaagtcagcaaaaacgcaccgttaatattgaccagacaattgcaacttaatacttcattcataaaacattacgccacggtacataaagtaaccgtggcgtaatggctatcagaccgctttaatgtcgatggcttcaccctgcatccgtttacgcagggtacgtttcgtacggtcgataacatcgcccgccaactgaccacaggcagcatcaatatcatcaccacgagttttacgcacaatagtggtgaaaccgtagctcatcagcacttttgagaaacggtcgatacggctgttcgagctgcgtccatacggcgcacccgggaacgggttccacgggatcaggttgatcttacacggcgtatctttcagcagttccgccagttggtgcgcgtgttcagtgccgtcgttaacgtggtcaagcatcacgtattcaatagtgactcggccctgattggcgttggatttctccagataacggcgcaccgcagcaaggaacgtttcgatattgtactttttgttgatcggcacaatttcgtcacgaatttcgtcgttcggcgcgtgcagggaaattgccagtgcaacgtcgatcatatcgcccagtttatccagcgccggaactacaccggaagtagaaagcgtgacgcgacgtttagacaggccaaaaccgaaatcatcaagcatgatttccatcgccggaacgacgttgttcaggttgagcagcggctcgcccatgcccatcatcactacgttagtgattggccgctgaccggtgacttttgctgcgccgacgattttcgccgcccgccacacctggccgataatttccgacacccgcaggttgcggttaaagccctgctgggcggtggaacagaatttacactccagcgcacaccccacctgcgaagagacgcagagcgtggcacggtcgtcttccgggatatacaccgtttcgacgcgctgatcgccaacggcgatcgcccatttaatggtgccgtcggatgaacgctgttcttcaaccacttccggtgcgcggatctccgccacctctttcagtttgccgcgcaacactttgttgatgtcggtcatctcatcaaagttgtcgcagcaatagtgatacatccacttcatcacctgatcggcgcggaagggtttttcacctaaatctttaaaaaactcccgcatctgctgacggttgagatccagcaggttgatttttccatctttcgtggtgacgttttcaggtgtgactaattgttcagacatatgctattccggcctcgttattacacgttatggcccctggagggttgaaaaaagaaacgccccggtgagcggctgctcgtccgggggcgctgcattgtacaaattctggcgcacggatgccacgtttgcacgcggcatttacgaaattattaacgggtgcgcgggcacacttcgccttcgccgaagaaataagcgatttcgcgagcggcagattcgacggaatcagaaccgtgggtaccgttttcggtcaggctgtcagcgtaatcagcgcgcagagtaccggccagtgcgtttgccggattggtcgcgcccagcagatcgcggtgacgctgaacggcgttttcaccttccagcacggaaaccacgatcgggccagaggtcatgaattcaaccagaccatcaaagaacggttttccatcgtgttcagcataaaagccacgagcctgttcaacggtcaggtgcagcattttggtgccgacaattttgaaccctgcagcttcaaagcgcgcaaagatattaccaatgacgttttttgctaccgcgttcggtttgatgatggaaaaagtacgttcaatagccatttttacctctgtaaattgttctgttgttgtctgtaccagcgtacgagatggcgcggattataatgagcaacagggccgttgactattgatgagggtaacatttttttaaaataaaatgagttttagcaacaatcagggacaaaacagactattgcatgacaaatttcactgtcgcgatttgccccacgtcatccatcaccagcaattgataatcacctttatccgtcaaatgcagggtcacgttgcgcccgcgttcagttaacggttcgccattcagaaaccaccagcgttcacctgcccctccacttgattgcaacggcaaagtcgcttccgctgcgcccggtaaacgtttaataatcgcgccatcgcgaacgcctgtcagctgcagagggagctgggcatcgtgaccgtatggcgggcaaattgtcgaggccggtggtaagcgcacagcgcgacgttctgatgcgggcagccagggttccagcggtagcggccagacatttaccatttcttgcttcgcctgcgggcagtcagcggcgacgcgctgccctttgtcatccagccagatggggaagcgaatgccattaatcccttcctgctctgacagtaacagcgttggcggctggctgccatccagcagccaggttgccaggcggcggcgacagttaccgtcaccttccggcaaagactgtccgcccggccagcagataacgccacgagtgactgagttcgggcgcgggtcttccggcagattcgcactgcgcgacagtaagatattattgacctgattcaacaatggtacggcactggcaaagccaaactgaccaacaacgggcgtgccgtcaggtctgccagtccagatcccaatgacatagcgagcgttaaccccaatcgcccaggcgtcacgatagccatagctggtgcccgttttccatgccagtggggcgacgcgcggcaaggcactatccggcaagggttgcgcttcatcagccataatccggcgaatgatccacgccgcccccgacgacattaaaggccgttcaagcagcggatcgtcaggctgtaagcgcaatttgcctgccttgccgtggcgagcaaacgcggtatacgctgccgccatatcttccagttttgcaccagcgccgccgagaatgagtgaaagattcggcgcagcgccgttgggcaaatataacggcaatccaacattgcgtaactttgccgcaaaccgtttcggtccataggcttccagcacctgcacagcaggtaagttcagcgagcgcaccagcgcctcgctcatgctgatcgggccatgaaaaccgctatcaaagttacctggtcgataatcaccggtgcgccgggggacgtcttgcagcagtgatgccgggtggatcaagccttcatccagcgccagaccataaacaaacggtttgagcaccgatcctggcgatcggatcgcattgaccatatcaacatgaccaaagcgtgaatcatcgttgagatcaaccgatcccacccagccgcgaacacgcatatcggtatgatcaaccacgatcatcgccagtgagctgcgcggtggcaaccgccctttccagttttgcgccagttcttccagacgtcgttgaagaccggcatccagcgtagtaacgattttgtcgcttttgcttttaccgagcatcatgcgcgaaaacagcggtgccagttgcggcatttgtcggggtgccagccagatgggttcttcccttgactcttttacctgctcacgggaccacacaccttgcgcagccatccgttcgagcactttattacgcgcggcttcggcacgctccggccaacgatccgggcgaagacggctgggcgcttgcggcaaaaccgccagcattgccgcctcggaatagcttaaattcgcaggcgactttccgagataagcccaacttgccgcaccgatcccctgcaacgtaccgccaaacggagcgcggttaagatacaaggtcagaatttcacgcttagacagatgccattccagttgcaacgcgcgccagagctggcgaattttgccgccaaatgttttggggtgaggatcaagcagacgagcaacctgcatagtgagcgtgctgccaccggaaataacccgtcccgaagtgagatcttgccatgctgcgcgcgccaccgagaatggattcacccccggatgcttccagaaccagcgatcttcataattgatcagcgcttcaaggtaacgtggagaaacatcttcgattgttaccggataacgccagatgccgtcagcatcggcgaagcgccagagcggcgtaccatcctgcgccacgaccactcgtgcgggattgacttcatgcagcggtagaggccagagtttatctgctccccacgctgcaagaaaaaggagaaatggcgcagctgccagcgttatccagcagccgcgtttggttaacaagcgaggcatttacggtcggacaatcagcagatcttcagccgcgccggtcgcccgccattggggaacatacattgattccaccatcggttgcggtacctgatacgttcccggcgtcaccgcccgcgccagatacaccagcgttaccggttggtattcatcaacggcaaccgccgccacaaagcgatcgtcacggaactcaatgtgcttaatactcgcctgctgcatctggttcagtaagttctgcacttcgccaccactttgctccaggctggcgctaccgttcgccagattctggttttccagttccagacccacaggcagcagatccacgactaacgcatccggcacgctgttactggcttttacctgcaaccacaccagcaccagatcgccgctacgtaacgagtccagcgatttgctcttaccatcagtaccaagaatatgacgctcgatttgcagcacattgttcgccggtaaaggtgcggattgcggataaccgctggcatccatacgcaaccataacggctgatcgccactgttgctcacctgcaaggtgacaagttgatcgctattcagattgctgttttgcgctttctcgcctgtcagcggctcagctgagaaagaggtttgcgcctgccatttacccggtaaatcctgaatcgtacgggcagccaggaacaacgcgttactttcctgcgtcgatagccagcgttcaccaaacgcctgctgcgaaagtgtgttcagcaaagtgtactgctcatcgggtagcagtttattttcttccagcaaggagagcattaacgcgttgtcgcgcagtggactaccgtaatcacccagccatatccgctcatcactatttctcggcgttttcagcgccagcgcaatcgcttcttcaccacgcgtcgcatcacccatggttttcagcgcaatgccaagttgcagcagcggtaaaccagaagcggcatctgcacgatgctcccagatttcacgcagcgcacccagtggtgctttttgctgacgggccagcaccagcgcagcgtaagactgaacggcgaatttactggctttgagattatccgcgtacgggatcgacatcatgcccggatcttgtaaatagcgcagcagacgctcattaccccggttaatggcgtctgtcggcacgctgtaaccctgttcgcctgcgcggaccaggaaatccatcacgtaagccgtcagccagtactcttcgtcaccgtttttatcccacagcgcaaagccgccgttatcacgttgcatttgcagcaaacgggaaatgccgatatcgaccgatgcacggcgtttctcatcactgtcgcctttgatgcccaacgcctgcagttgggctgcgttggtataaagtgacgggaacaggccgctggcggtttgctcaagacagccgtacggatacgcttttaactctttgatataacgtgcaatgttcagcggtggtttgccgctcaacaacaattgcccttccagcgtaacaggcgagaagttttgcaatccatccgccggaatcgcccatgtctcaccaggctgtaacgccgtaccgtaattaaccgtttgtgccgggaacgccggacggacgccgattttccactgcttatgctgatcggcaacggtttcacccggtaacgctaacccgctaatggtggcctgaatttctccatcgccataacccggcaatgctcgcaccgggataaacagcgtagtacgcacacctggcgctaattcaacggctgcgggtgaatcgctgaccagttcaagcaaaccactggcggtcagggcaacgttcagtttttgcggtttatcggtaagattagtgatatccagcgtcagacgcgaggtatcgccactcgccataaagcgcggcatgttcagttcagcaatcaccggtgcggcaactatcactttgctttcgttgctaccgaaatcatctgccgtccaggcttgcgccatgacgcgcaattcaccgttaaaatcgccaatcggcagtgtaaccgagccttcgccctgttcgttgagcgttaccgacagcgcctgctgcgcgacaatattgacgtgattgaccggcggtttaccaccacgtttcagctcatcaccatcgccaccgaaacgcagagctgccagacgcccctgaccttcaataacctgaccgtaaatatcgtaaatgtctgcgccatagcgtttctgaccaaagaacgcctgccacggatctggcgtaacgtagtcagtaatattcagcacaccactatcaacggcagacaccagcacattcacctgtttaggcttctcgccatttttagtgctggctttaattttcacggttaatggttgattgggacgcatttttgctggtgtttccagcgccagatcgaggcgacggttttcatcaccaagcggcagatgcaacacaccaaccgcgcgttttggcgtcgcggagcgagatttatcgccaggacgcaccaccagcgtactcaaataaagatcatgacgattccaggttttatcgaccggaatcgtcagatccagcccttgagccggaacatcaatctcttgccaccacagcggcccttcactggactcgaccatcgcataacctttacccgccgttggcgcggcaatatgcaacttaatggtatcgccggggcgataactggctttatctagtttcagcgtgacacggtcgggtcgcactgcgccgctcccgtcgctgttgtcctgccagctatagccagcccaaaaacgcacgctactgaccgcttcattcggcgctttgacttccagacgataagcgccccactctaccgggaaactgaccttaccggtttcatccgcctgaagatccagagtttgttcattttcgatcagatctttttgatcaaactgtgactgccagccttcatcttctgaccagttccagtagtaatcgcggcgttcgcgaatcaggcgcacctgcaagcccgacacggcttttttcacgccttgcgcatcgctataaacgatgtcaaaagcggcgttactgccttcatcaacaatgggctgtttcaccgtgctgtcagtgcgataatcgtaaaccgatttcaaggcgaactgcggacggagccccggcaatgcatcggcaggccagatagcctgctcagcgcggcgcgtcaccgggcgaccgcccgattccagcaaactgccctggaaaataacctgcaatggggaatgcgtttccttccactggctttctgtagaaacttcgccgcgccctttatcatccagcgtcaactgaacttcatccagcgtgcgggaaaggttttcggcagctatatcgccgaattcaaaaccaggtaaggctgacacagcctcacgcagtgggcgcaggaaaagttgcccttgcaaagtattaccattagcaggcgcaccgtacaggtagtatcccaccacggagaatttcacttcatcattcggcgtaagcggggttttctcaccggtcagattcagcgccatacgctctggcataaaatcttcgacgtggaaatcccacatccggtactggttatcgcccgtgttggcgcgaatatgccacataccggttgccgcattgctatcgagtggccaggtaaagtggtagaggccattctccggctgactaacgacgttcctgagtacctgcccgtcaggtttaatcacgtctaacttgatgggttgatcgggcaatgctttaccgtctgcatcgcgcagtaaaccattgaggattaccgtttcacctgggcgataaagatcgcgtgggccaaacatgaaaaactgtttgctatagcctggcgcgccagcaatgttaaattctgctaagtccagcgccggaagttttaaatcgagtagcgttgtctgaccgtctttacgtgccagcagtaatgccgcatttttatcattttccagctgcacatgcccctgagcgtcactggttgcctgagtcagagtctgtcctttctcatttaataaagagacttcaattccttgctgggccgcgccgttttccagactttgggtaaagatatccagacgattgtgataacggtgagctgaaacgccgatatcacttaacgtaaacagcgtcgcgggattactgtaatcgtaacgtccagcctgattcatcacagccagatacacgcccgcctgctgaagcggtttgatatcgcccagcggcagcaataatttttcacgggtgttacgcgcaggattgagatcaaaccgtccggtgtagaccagatccgccatctgcagcagtttgtctgactgccagttcgccagcgaattgcggtattcccattggctaatgaatgctggcagagattctggcttaacgcggaagaagttaacatcgacattattaacgttgagcgccattaccggcagcccttcaacgactttgccaggcagcagcgaaccacggctggcaaaaccgacgctgggttggatgtcgcgggtagttatagttttttcgtaatctttactgaaggttgcgttgttgagtgctttgacctccttgccaatagtaacgatcaaatcacgtttcggttcgaggtggcgtaaacgtagctctttaagattatctgacagctcccaggcaccatccactttgccgctttttttatcgacgacatgaataacgcgtgagaaatcctgatccgggtcgagagggatggagaacgtcagcaccagcgtggctgcaccatcaagttggacttcagagagatccagcaatgtcagcaccttaccggcactctgttgggccagtttttgtctctccggcacggagagttttgctgaactcgcgttttctgaagaggccgctttagtaacttcagaaggcgcatcttttttcaccgctgttggcgcgttatcgttgttgtcgcaccctgccagcgccagcattagcatgcaggcggctacgcgtaactttttcatttttcatccctgccacaatggcccgttagcaacgtcgaataattattatgcgtgagaatttacgttatgtaattcagtatcacgcccatacaatccgaattttagtgagaattgtggctcagacagccaaatcagcctctttcgcttgtcgcttttcactaaacatccgacaatttagcctaaccccggcaaaaatggagatgcctatgtccacgacatggtttgtaggagccgactggctcgccgaacatattgatgacccggaaattcagattatcgatgcccgcatggcgtcgcctggacaggaagatcgtaacgttgctcaggagtatctgaatggacatattcccggcgcagtgttttttgatatcgaagcgctttctgatcacacttccccgcttccgcacatgctgccgcgcccggaaacgttcgccgtggcgatgcgtgaattaggcgttaaccaggataagcacctgattgtctatgacgaaggtaatcttttctcagccccacgagcatggtggatgctgcgcacctttggtgtagagaaagtgtcgattctggggggtggacttgcaggctggcagcgcgatgatctgctgttagaagaaggtgcagtagagctgccggaaggagagtttaacgccgcgtttaatcctgaagccgtggtgaaagtaaccgatgtattattggcaagccatgaaaatacggcgcaaattattgatgcccgcccggctgcacgttttaacgcagaagttgatgaacctcgcccaggtttacgtcgcggacatattcccggagcactgaatgttccgtggacggaactggtgcgcgaaggcgaactaaaaacgaccgatgaactggatgcgatattttttggtcgcggcgtcagctacgacaaaccaattatcgtcagctgcggctctggtgtaacggcagccgtggttttgttagcactcgcgacgctggatgtgccaaacgtgaaactgtacgacggcgcatggagtgaatggggcgcgcgggcagatttaccggttgagccagtgaaataagtattttacaggcaataaaaaaccgccgaatttggcggttttttattgctggtctggttcgcggcctttccagcaggttgtattaccgtagtaatgcaagcgcgtctcagcggagacaatactcgccagtaactctctttttgtcaagcaaaagagagttattattgttctgttagtgtattatccactgcggccctttccgccgtctcgcaagcgggcgctggcttaaggaaaggatgttccgcgaccgttagagcaagcgcgtctcagcgcttgctatcgcggcaatatcgccagtggtgctgtcgtgatgcggtcttcgcatggaccgcacaatgaagatacggtgcttctgtatcgtacttattgtttctggtgcgctgttttcccaagtaaataataaccggagtctctccggcgacaatttactggtggttaacaaccttcagagcagcaagtaagcccgaatgccgccctttagggcggcatattttagattatccggttttgtttaaagtcacgcaaaaaaccaccccagcgacgttcatagaatggcacaatatgttcggtaataaagtggctaattcctttttccccttttttcacctgacaaatatcgattggttcatcgccaggtaatgtatcggtcgctacacttcccgtcgcctgaataatttcttcgatatcaccatcggcttcaatgccaataagtaaattaggctgtgcctcttcgttctctttaattgaacaaataaaagcacgcttcaccggcttaatggttttaaataaggtggtgagtgaatcaatcatttgtgctggcggctctgcgacttccgataatatcagcgattcaccgccttccaggatttcctggctgctcagcggatttccctcttcaccaatcaacaaactgatttcacgcggcataaattctttaccggtcggcagtttggcattaaggaagagcgtttcgccaagggtcatctcaaacaatgtgcgaacgggcattacgacaaatgcctgttcgtcttcaaccgcctgttgaagcgcttctaacgaggtgaaaaaaggaatgacgctggtgccgtcttctttttcccagtgctgtaaatcaagcgcactatcttcaaccacagcctcgccctgcgccgccgtaccaggcacccagacggtggattccagtagagtacggaaaaaggccgggcggtgcgccggttcggttgctgctttttccagcaggtcttcaagttcgttttttgtttcggacataagaaccacaattcattcaacgttcggggcgcaaatgcctgatgcgctacgcttatcaggcctacaagggattcgcaatttgttgaatttgcagaatttgtaggccggataaggcgtttacgccgcatccggcatattagtttacgccgttaacagattagctatcgtgcgcacaccaagtcccgtagcgcccgcagaccactgttcaaccggcgctttacggtaagtcgccgagcagtcgatatgcagccagccttgctgatagttctcaacaaagtgcgacaggaagcccgccgccgtgctcgcgcctgccggatacgccgcgcttccggtattgttcagttcggcaaagttagacggcagctggctgcggtggaattccgccagcggcagacgccagaatggttcgttctcttgtgaggcactcgccagcaaacgaccggcaagcgcatcgtcaaaactgaacagcgcgtgataatcattacccagcgcagttttcgccgccccggtgagggtcgccgcatcaatgatcatttccggtttctgcgcactggcatcaatcagaccatcggcaagcaccagacgcccttcggcatcagtgttcatcacttcaacttttttaccgttgcgataggtgatgatatcgcccagcttgaacgcattgccgctaatcaggttatccgcacagcagaggaacagcttcacgcgcttgttcagtccgcgcgtaatggcaaatgccagcgccccggtaaccgttgccgcgccgcccatgtccgacttcatcgagtccataaacgcagtctgtttgatgctgtagccgccggagtcaaaagtgatacctttacctaccaggcacgcgtacactggcgcttctttatcgccagttgggttgtaatccagcgccagcaataccggagaacgttctgaaccgcgtccgacggtgtgcagccccatataaccttgctcacgcagatcttcgcctttggtgatccgataagtcacacgatcgcccgcgacgttgctgatcagatcaacagcacgctgtgccagttgcgatggtcccaattcttctgccggtgcgttgatggtgtcacgcacccagtcgatgatcatcaggcggttatccagttcctggcgctgggcatcgtccagatccggccactccactttacgcgtgcctttcggggctttgtaaccttgccagaatgcccagcagcgatccgcatcccagccttcaccgcttaactgaacatgcttgatgcccagaccgtcaatcttgcgcgccgcacgctggatcagccccagatcgtctgccccgttcaaatgcagggtaatgccgtcattattaatgctgtaagttgctttttctccccagcgcgcgtcggcaggttggggagagagggtaatcttcatcgcttctgtcattttagttatccttctttgtaaaagggccgccagttggcagccccaggatttttccgctaaatgattcgcgttgcagaaaggcggcaagtgagtgaagccccaggagcatagataactatgtgactggggtgaacgagcgcagccaacgcatctgcggcgtgaagcatgacgcggaaattattcggcctcgtccagccagactaacaaaatcgcttcgaggattttctcgttggatgcctgcgggtcgtcgtcgaaatcttccagatcgcaaatccactgatgcatatcggtgaatcgaaccgttttcggatcaagatcaggatacgcatcgtacagtgcttcgccaatttcgcggctatcggtccacttaagtcccatactaacctctgttaatgctcacgcgcatggttgatagtgtaacgcgggatttcgactactaaatcttcgtcggtaacgcgtgcctggcagcttaaacggctttcgggctccagtccccaggctttgtccagcatgtcgtcttcctgctctgagctttctggcagcgagtcaaaaccttcacgaacgatgcagtggcaggtggtgcaagcacaggatttttcacaggcgtgttcaatctcgataccgttacgcagagctgcgtcgagaatggtttcaccgctattagcttccagaacagcgccatcaggacagagatcctgatgaggcaaaataacaatctttggcatattaaacctcgtccacggaatggcctttcagcgcacgacgaaccgactggtccatgcggcgagcggcgaaatcctgggtttgtttgtctacgtttttaatcgcttgttcgatggcgtcaacgtcatcgccctgcgccacttcactcaggtgagcggcagcatcgtcaatgacctgacgttctgcggcgcttaacagcgcggcatcagcagccagcgcgccgtgcagactttccagcacacgcgccgcttctactttttgttctgccagcattcgggcttttacgtcctgctcggcatagctcattgagtctttgatcatcgaagcgatttcgctatcggtcagaccgtaagacggtttgacctgaatagacgcctcaacgccggtggatttctccatcgccgtcacgctcaaaagaccgtcggcatcgacctggaacgtcacgcgaatatgcgcaccaccagccggtagcgccggaataccacgcagcgcaaaacgcgccagtgagcggcagtcctgcaccagttcgcgctcaccctgcattacatggatagacatcgccgtctgaccatctttaaaggtggtgaaatcctgagcgcgggccaccggaatagtggtattacgcggaatcactttctccaccaggccgcccatcgtttcgaggcccagcgacagtgggatcacatcaagcagcagcatttcgctgtctggcttgttacccaccagaatatccgcctgaatcgccgcgccaatagcgacgactttatccgggtcgatggaagtcagcggtggacgaccgaaaaattcgcctacccgttcacgcaccagcggcacgcgagtagaaccgcccaccatcaccacttccagcacttcgtcagcttctacacccgcgtctttaagcgcgcgacgacaagccagtaaggttcgttttaccagtggcgcgatcagttcattgaattgttcacggctgatttcgccctgccagcccgcaacgttaacggtcacggagtccgcatcgctcagcgcgattttggctgcaatggcggcatccagcagttcacgctgaacgcggttatcgctacgatcaggaatgcccgcctgctcgcgaatgtaatccgccagcagatggtcgaaatcatcgccgccgagcgcggaatcaccgccggttgccagcacttcaaacacgccgcgacttaagcgcagaatggaaatatcaaacgtcccgccaccgaggtcataaacagcgatcacgccttcctgaccggaatccagcccgtaggcgatagccgcagcggtcggttcgttaagtaagcgcagaacatgcaaccccgccagacgcgccgcgtctttggtgccctgacgctgggcatcgtcaaagtacgccggaacggtgataactacaccatccagctcgcctgccagggcttcagttgcccgcgccgccagtgctttgaggatgtccgcagaaacgcgcaccgggttcagcagccccgccgccgtttcaatcatcggcaggccgttttcgctggcctggaattgataaggcagatgcggatagcgttgctggatatcagccagcgagcgccccatcaggcgtttaacagaactaatggtgttggcggtgtcaagcgctgcgttagtacgcgcgtcataacccaccgaatgcccttgctgttgatagtgaacaacagatggcagcaggtgacggccttcatggtcggctaacgtttcggcctgaccgctgcgcactgtcgccaccagcgagttggttgtgcccaggtcaataccagccgccagacgacgctgatgcggcgcagcactcaaaccaggttcactaatttgtaataaggccatgtttagcttccagaaattaaaaatcgagcagtttttcttcgagttgttcggcactgctccgcagtttatcgagaaaacgcagcttacgcacggtatccgccgccgcgtcccacgcctcgttgtctaactgttcaaccatcaactgatggcgggtatcaaacatctttttcacacgtttgataaagctttccagccgcgcttcatctttcgcctgttcgatctcgtccagctcttcgcgcagctccaactgttccatcaggaacgcggtgtcgcgcacagtatgctgctcgctggcgagatcaaaaccgtgtaaagaaagcaaatattccgcgcgcattaacggatgacgcagcgtttgccaggcctggttaatggttgcagattgctgtacggcggcgagttgttccgcctggcttccgctggcgaatttatcaggatgatactgacgttgtagatcctgaaaacgcaggctcagcgcctgggtatcgagttgataacgggcaggcaagccaaagaaggtgaagtaatccataacattctcagggctgcgatccgccgcgataacggcgaatcaggtaaaacaaaccccacgcgcaggcgaccacggtggggttatcggtatgcgcatcaaacgtggaagctttcgccgcaaccacactcatctttgacgttcgggttggtgaatttaaacccttcgttcaggccttcttttacgaagtccagctgcgtaccgtccagaaattgcaggcttttgccatcgaccacgactttcacgcctttgtcttcaaacacgatgtcttccggcgtcggttcgtcaacaaattccagtacataagccatacctgaacatccggaggttctcacgcccagacgcaggccaaaccctttgccgcggttagccagaaaggtatttactcgcgctgctgcactgtcgctcagtgtaatcgacataaccaaacctcaactcttattttgcttcacgtttgcttttatagtccgcaatggcggctttgatcgcgtcttctgccagaatagaacagtgaattttcaccggcggcagttcaagttcttcagcaatatcggtatttttgatcgcctgcgcttcgtcgagagacttccctttcacccattcggtgaccagggagctggaagcgatagcagaaccgcagccgtaagttttaaaacgcgcgtcttcaatgataccttcatcgttgactttaatctgcaacttcatcacgtcgccacaggccggtgcccccaccatgccgctgccgacgttctcgtcgttgttgtcaaaggaacccacgttacgcggattctcgtaatggtcgataactttttcgctgtaagccattataaattctcctgattccgataccgattaatgatgagcccattcgatgctgttcagatccacgccctgcttgtacatttcccacagcggagaaaggtcacgcagacgaccgatggatttacgaactaactcgatggtgtagtcgatctcttcttcagtagtaaaacgacctaaagagaaacggatagagctatgtgccagctcgtcgttcagccccagcgcgcgcagcacgtaggacggttcgaggcttgctgacgtacaggcggaacctgaagaaactgcgaggtctttcagcgccataatcagcgactcaccttcaacgtagttgaagctgacgttgagaatgttcggcgcaccgtgttccaggtcaccgttcaggtaaacttcttcgatatctttgatgccgttccacagacggttacgcaggccgcgcagacgttccatctcggtcgccatctcttcttttgcgatgcgataggcctcgcccattccgacgatctggtgaacaggcagagtgccggaacgcataccgcgctcgtgaccgccgccgtgcatttgcgcttcgatgcgtacgcgcggtttacgacgtacatacagcgcaccgatacctttcgggccatagattttgtgaccggagaaagacatcaggtcaactttcaactggctcaggtcgataggcagtttgcccacgctctgggttgcatcaacgtgatagataatgccacgagcacggcacatttcgccgatagccgcgatatcctgcaccacgccgatttcgttatttacgtgcatgatggaaacaaggatggtgtcatcacgcatcgctgcttcaagttctttcagatcgataatgccgttacgctgcggtgccaggtaggtgacttcaaaaccttcgcgctccagctgacggcaggtatccagtaccgctttgtgttcggttttgctggtgatgatgtgcttgccttttttctgataaaagttggctgcacctttgatcgccaggttgtcagattcggttgcaccagaggtaaagacgatttcacgcggatcagcgccgaccagatcggcaatctgattacgggcgatatctaccgcttcttcagcctgccagccgaaacggtgagaacgggaggccgggttaccaaaggttccgtccatcgtcataaactgcatcattttctcggcaacacgcgggtccaccggcgtggttgcggagtagtcgagataaatcggtaatttcattgctctataaactccgtacatcactcaatgcaaggaaccaggctaccggctggatgtacgaccgtgtttacggagcgcgatacgccccggcctgattctaatatcttgttatctttaacctaactgtttcgggtttcagcaagttgacaaacttacgaatctccgggagcttacataagtaagtgaccggagtgagtatgtgcagtcaacgcagatgcaacacgaaacaggacggttaaattaagcgcgtaacttaacgtcgatcgcgtcttgtatgcgggtgcgtggcgcgtcgtgagtatgctgacgaccagacacatccagcacttcctggttattaaccagttcgcctaaagtaatgttgttgagaaaaccggtgagacggtcgctcaaatcacgccacagcgcgtgggtcaggcatttatcgccgccctggcaaccgcctttaccctgacaacgggtagcatctacagattcgtcaacggcgctaatcacttcgccaacggcgatgctgctggcatctttgcctaacagataaccaccgcctggtccacgtacgctggaaaccagaccatttttacgcagacgggaaaacagttgttccagataagaaagggaaattccctgacgttcggaaatatcagccaacggtaccgggcccgcttcagagttgagcgcaacgtcaagcattgcggtcacggcatagcgccctttagatgtcagtctcatgtcttacttcacctcaaactcgcccctgcccggggttttttattgtaaaagtgggggtattgcatagcagggtcaagtctgacattcccgagtaaattggtcaactatttacttgactgatttagtcgggtatttaaccttcagtgccatttttttatcgtggcgtttgtacctgttgtccttccagaccatgggcgggttgagggcaattattcgcattagcgctggcctcttcccctcaccctaaccctctccccgaaggggcgaggggaccgtccgtgcatttatctggcttagccctcaggccttattacctttattctgctgctctatagaagccagaatcccgcgcaggatattcaattcctggctttccgggcgcgcacgggtaaacagacggcgcaatttattcatcacctgccccggatggttttcacggataaaaccggttgccagcagcgtttgttccagatgaccataaaaacgctccagatcatcgaccagcggatacggcgtctcttcatgctcgacctgctcgccattttcctgagttgccagccaggccatacgcacttcataggcaataacctgaaccgccattgccaagttcagcgaactgtattccgggtttgccgcaatcgcgacatgataatggcatttctgcaactcttcattggtcaagccgacgcgctcacgaccaaacaccagcgccaccggggtatttgccgcttcagcgacgcttttcagaccgcattcgcgcgggtcgagcatcggccacggcagcgtgcgggagcgtgcgctggtgcccaccaccaggctacaaccggctaacgcttcgtcgagcgtatcgacgatgtgagcattaccaatcacatcgctggcccctgctgccagggcaatcgcctgggagtcgggtttcaccagtggattaaccagccacagattggttaatcccattgttttcatggcacgggcaacagaacccatattgccggtgtgtgacgtctccaccagcacaattcgaatattttgcagcattgtctttcttcatctaaagattattcacgcatcttatcataaaacgaagacagatgccgatctcgctgctatactctgcgccgttttcccgttctttaacatccagtgagagagaccgatgcatccgatgctgaacatcgccgtgcgcgcagcgcgcaaggcgggtaatttaattgccaaaaactatgaaaccccggacgctgtagaagcgagccagaaaggcagtaacgatttcgtgaccaacgtagataaagctgccgaagcggtgattatcgacacgattcgtaaatcttactcacagcacaccatcatcaccgaagaaagcggtgaacttgaaggtactgatcaggatgttcaatgggttatcgatccactggatggcactaccaactttatcaaacgtctgccgcacttcgcggtatctatcgccgttcgtatcaaaggccgcaccgaagttgctgtggtatacgatcctatgcgtaacgaactgttcaccgccactcgcggtcagggcgcacagctgaacggctaccgtctgcgcggtagcaccgctcgcgatctcgacggtaccattctggcgaccggcttcccgttcaaagcaaaacagtacgccactacctacatcaacatcgtcggcaaactgttcaacgaatgtgcagacttccgtcgtaccggttctgcggcgctggatctggcttacgtcgctgcgggtcgtgttgacggtttctttgaaatcggtctgcgtccgtgggatttcgcggcaggcgagctgctggttcgtgaagcaggcggcatcgtcagcgacttcaccggtggtcataactacatgctgaccggtaacatcgttgctggtaacccgcgcgttgtgaaagccatgctggcgaacatgcgtgacgagttaagcgacgctctgaagcgttaatgactcaggcgggtgatgtcactcacccgccctcgcctttcaggcgctattctgaaatacttcctcaccgctttactttctttcgtcactctcccaccatctttccccgattaatggatgataaagaagtcacaaggaaaggttatggcgctgccagtgaacaaacgcgttctcaaaattctgtttattctctttgttgttgccttctgcgtttatttagtgccgcgcgttgccatcaacttcttctattatcctgacgataaaatttacggtcccgacccctggtcggcggaatccgtcgaatttacggctaaggacggtactcgtctgcaaggctggtttattccttcttcgacgggccctgctgacaatgccatcgcaaccatcattcatgctcacggcaatgccggaaatatgtccgcccactggccgctggtcagttggttacccgagcgtaatttcaacgtttttatgtttgattatcgcgggtttggtaaatcaaaaggcacgccgtcccaggccggattgctggacgatacgcaaagtgccatcaatgtggtgcgccatcgcagtgatgtaaacccacaacggctggtgctgttcgggcagagtattggcggggcgaatattcttgctgttattggtcaggatgatcgtgaaggcatacgtgcggtgatcctcgactccacatttgcctcttatgcaaccatcgccaatcagatgatccccggcagtggctacttacttgatgagagttacagcggcgaaaattatatcgccagcgtcagcccgatcccgcttttactcattcacggtaaagctgatcacgttatcccatggcagcacagcgaaaagttgtatagcctggcaaaagagacaaaacggttgatcctaatcccggatggcgaacacattgatgctttttccgatcgtcacggcgatgtttatcgcgaacagatggtggactttatccttagcgcgttgaatccgcagaactaacccatgatcgctagcacgataatcattcacaaaaccaccttaagacatgctaatccactggtcagaacagtttaagatgagaaaaattctgtgacgcttgccaacatttctgatgattagcattcccttcgccatctccctgagcaaactttagctattcttatcaattatgcttatgggagatctacagatgatgcctacgcttgctccaccatctgtcctttcggctccccagcgccgctgccagatcttgctgacgctctttcagccggggttgaccgccaccatggcaaccttcagcgagcttaatggtgtggatgatgatattgccagtcttgatatcagcgaaacaggacgggagatcctgcgctatcatcaactcacactgacgactggttatgacggtagctaccgggttgaaggtacagtgcttaaccaacgtttgtgtttatttcactggctacgacgtggtttccgtctgtgtccgtcatttattaccagccaattcacccccgccctgaagagtgaactgaagcggcgcggaattgcgcgtaacttttacgacgataccaatctacaagcgttagtgaatctctgctcccgacggctgcaaaaacgctttgaaacgcgcgatattcatttcctgtgtctgtatctgcaatattgtttgctgcaacaccacgctggaattacgcctcagtttaatccgctccaacgtcgctgggcggaatcctgccttgaatttcaggtagcgcaggaaattggacgccactggcagcgtcgggcgctccagcctgtaccgcctgatgagccactgtttatggcattacttttttccatgttgcgggttcccgatccattgcgtgatgcgcatcagcgagacagacaattgcgtcagtctatcaaacgtctggtaaaccattttcgtgagctgggaaatgttcgtttttatgatgaacaggggttatgcgatcagctttatacccacctcgcccaggcgttaaatcgcagtttgtttgccatcggtattgataataccctgccggaagagttcgccagactgtacccacgcctggtgcgcaccacccgcgcggcgctggccggatttgaaagtgaatacggcgtccatctttctgatgaggaaagcggtctggtcgcggtgattttcggtgcctggctaatgcaggaaaacgatctgcatgaaaaacagattattctactgaccgggaatgatagcgagcgagaagcgcagattgagcagcagttacgcgaactaacgttactgccgctcaacattaagcatatgtcggtaaaggcatttttgcagacaggcgctccgcgtggcgcggcactgattattgcgccttataccatgccattaccgctcttttcaccaccgctgatctatacggacctgacgctgacaacacatcaacaggagcagatccgcaaaatgctcgaatcagcatgagggaacaactttcgggcgcaaaaacattgccggaagcgccaccagcgccattacccagaacacgccgtggcccagatattgatacaggaaaccggcgaaaacggtcatgatagcgatactgccgcccatcgcgacggcagagtaaaccgcctgtaaacggatgacttcgctaccctggcgaacagcaatatagcgcatggcggccaggtggcagaccgtgaaggtgccgcaatgcaaaatttgcaccactatcaaccacggcaacgccgtagttgctcccataatgccccagcgcactacgccgcaaatcgccgagatcaacagcatatcgcgagcactacaacggcggaaaagtttattactcagcgcaaagataatgacttccgccaccacgcccagcgaccacaaataccccaccgccgaggccgagtagccagctgcctgccagtaaatggcgctaaaaccgtaataggccgcatgtgccccctgcaataaacaaacgcaggccagaaagcgccagttctggcgaaccagcgccaaccacgcagaccaaccggtgctctcctgctggcgacttgccccttgtggctgaatcgtcggacggatgagaaagccgagcagcatggatgccacgcccaacgtcaacagcgcgaggatcacccgataatcaaacatagtgaccagtttgcccgtcagcgccgagccaatgacaaacgccaccgagccccacagtcgcactttgccgtaatcaagcgggaactgcttttgccacgtattcgccagtgcatcggtcaacggtaccagcggtgagaaaaagaggttaaagccaatcatcaccagcatcagccacgctacgtgcgcccccgcccagaaggcgacagcaaagagaagtgtcagcagtgccagcacgcgcaaggcggaaatcaggcgggaaggatcgctgacgcggggcgcgatgagcaaactcccgagaaaacgggcaaccagacctgcccccaataacaggccgatggtttctggcgttaaaccaatccctttaagccagacgctccagaaaggtagaaaaatgccgtaactaaaaaagtatgtgaaatagccgagcgccaaccagcgcgtggattgcaaaaccatgagtccctcccgtcaggaggcgttagtctggggttaatcgaatgttggtgcaagttgaaaaataagaatattcgagcctgcttcccgatgtctgtaacgccagttcacaagcactaaaaaactgcgatccgcgacgcatgttgcaaaaataatgcgtaattatgccgttacgcttgccaaacgttcctgcacaatggcgatgaaatcgcgtaatgccggcttcatctcccctttcttccacgccatcagtaaagcaatggaaggcacatttccggcaatgggacgaaaaacaacctgcccggtattaaaattattcatataaccgggtatcaaagtgacgcccagccccatgcccaccagattcatggtcaccagaatattcgttgccacctggacgatatttggctggctgttttcttgcgcaaaccacgctttaacgatcggcgcaagcgaaccggaatacgccggatcggtactgacgaaattcacgccatccagttgcgcggcggtgatctctttttcatgtgctaaagggtgatcaaccggtaacaccaccactaatggttcgtcaaaaagctccagataatcaatctccgggctataaacaggatggcgcattaagccgacgtcgagttcaccacggcgaattttttcctcctgttgcgtggtgattaaactcaccagctcaatcaaggtgtctggctgtctgagacgaaacattggtaatacttttggcaataaattcacttccgccgatggcacaaagccaatggttaattgtctgtcttcctgaacaattttccgcgcccgtaatttggcattttccgcttgttcgaggattgccagcgcgtcctggagaaaacattctcccgccgccgtcaacgcgactttgcgcttatccctcaccagtaacggaacaccgacacagttttcaagatcgcggatctggctgcttaacgaaggctgtgaggtatgcagtttttccgccgcacgggtaaagttcagtgcctgcgccactgcgacgaaatagcgtaaatgccgtagttccatcaccttccccttgttatcgaaaaaacgtctcagctggtagaaattaactatttcacatattagcaaccaaccagcaacatccttatgacacaaaaatagaaggtcaatacatcttatctttcaggattaaaaaatatgaccacaccctcagatttaaacatttaccaactgattgatacccaaaatggtcgggtcactccgcgtatttataccgacccagatatttaccaactggagcttgaacgtattttcggccgttgctggttatttctcgcccacgaaagccagatcccaaaacctggtgatttctttaacacctacatgggggaagatgcggttgtcgtagtgcgtcagaaagacggcagcattaaggcgtttctcaaccaatgccgccaccgggccatgcgtgtgagttatgcagattgcggcaacactcgcgcctttacctgtccgtatcacggctggtcttatggcattaacggcgagttgatcgatgtaccgctggaacctcgcgcctacccacaagggttgtgtaaatcccactggggactaaacgaagttccttgtgtggagagttataaagggctgatttttggcaactgggataccagcgcaccgggcctgcgtgattacctgggtgacattgcctggtatctggatggcatgctggatcgtcgcgaaggcggcaccgaaattgtcggcggcgtacaaaagtgggtgatcaactgtaactggaaattcccggcagagcagttcgccagtgaccagtatcatgctctgttcagccatgcttctgccgttcaggtattaggggcgaaagatgatggcagcgataagcgcctcggtgatggacaaaccgcccgcccggtgtgggaaaccgccaaagatgcgctgcaatttggtcaggacggtcacggtagcggtttcttctttactgaaaaaccggatgctaatgtctgggtcgatggcgcagtttcaagctattaccgcgaaacctatgccgaagcagaacaacgtttaggtgaagttcgcgccctgcgcctggcgggtcataacaatattttccccacgctttcatggctcaacggcactgccacgctccgcgtctggcatccgcgcggccctgatcaagttgaagtgtgggcgttctgtattactgacaaagccgcctccgatgaagttaaagccgcttttgaaaacagcgccactcgtgcttttggtcctgctggttttctcgagcaggatgactcggagaactggtgtgaaatccagaaattgcttaaaggccaccgcgcccgcaacagcaaactgtgtctggaaatggggcttggtcaggaaaagcgccgcgacgacggcattcctggcattactaactatatcttttcagaaactgccgctcgtggaatgtaccaacgctgggccgatcttctgagtagcgaaagctggcaggaagtgctcgataaaaccgccgcttaccagcaggaggtgatgaaatgagtgcgcaagtttcactagagttacatcaccgcattagccagtttctctttcacgaagccagcttactggacgactggaaatttcgtgactggctggagcagctcgacaaagagattcgttacaccatgcgcaccacagttaacgcgcaaacacgcgaccgccgcaaaggcgtccagccaccgacaacctggatttttaatgacaccaaagaccagctggagcggcgaatcgcccgtctggaaacgggcatggcctgggcagaagagccgccgtcacgcacccgtcacttaatcagcaactgccagataagcgaaaccgacatcccaaacgtatttgctgtgcgggtaaattatctgctttatcgggcacaaaaagagcgcgatgaaacattctatgttggaacgcgtttcgacaaagttcgccgtctggaagatgacaactggcgcttgctggaacgggatatcgtcctggatcaagcggtaatcacttcccataacctgagtgtactgttctgatgaatcgaatttatgcgtgtcccgttgcggatgtgccggagggtgaggctctccggatcgatacctcgcccgtcatcgccctgttcaacgttggcggcgagttttatgccattaacgatcgttgcagccatggtaatgcgtcgatgtcagaagggtatctggaagatgacgccacggtggagtgcccgctacacgccgccagtttttgcctgaaaacggggaaagcgttatgcctgcccgccaccgatccgctcaccacttatccagtacacgttgaaggtggtgacattttcatcgacttaccggaggcgcagccatgagcgatctgcataacgagtccatttttattaccggcggcggatcgggattagggctggcgctggtcgagcgatttatcgaagaaggcgcgcaagttgccacgctggaactgtcggcggcaaaagtcgccagtctgcgtcagcgatttggcgaacatattctggcggtggaaggtaacgtgacctgttatgccgattatcaacgcgcggtcgatcagatcctgactcgttccggcaagctggattgttttatcggcaatgcaggcatctgggatcacaatgcctcactggttaatactcccgcagagacgctcgaaaccggcttccacgagctgtttaacgtcaacgtactcggttacctgctgggcgcaaaagcctgcgctccggcgttaatcgccagtgaaggcagcatgattttcacactgtcaaatgccgccaggtatcctggcggcggtggcccgctgtacaccgccagtaaacatgccgcaaccggacttattcgccaactggcttatgaactggcaccgaaagtgcgggtgaatggcgtcggcccgtgtggtatggccagcgacctgcgcggcccacaggcgctcgggcaaagtgaaacctcgataatgcagtctctgacgccggagaaaattgccgccattttaccgctgcaatttttcccgcaaccggcggattttacggggccgtatgtgatgttggcatcgcggcgcaataatcgcgcattaagcggtgtgatgatcaacgctgatgcgggtttagcgattcgcggcattcgccacgtagcggctgggctggatctttaaggaagcacgatgaaagaaaaaacgatcattattgtcggtggcgggcaagcggcggcaatggctgcggcctcgctacgccagcaagggttcaccggtgagctgcatctgttttccgatgagcgacatcttccttatgaacgacctccactctcgaaatccatgttgctggaagattccccgcagttacagcaggtgttacccgctaactggtggcaggaaaacaatgttcatctgcattccggtgtaaccatcaaaacgctgggtcgcgacacacgagagttagtgttaaccaacggcgaaagctggcactgggatcagctttttatagcaatcggcgcggcagctcgaccgctgccgttgcttgatgcactgggagaacgctgctttaccctacgccatgccggtgatgccgccagactgcgagaagttctgcagcccgaacggtcagtcgtgattgtcggtgccggaactattggtctggaactggctgccagcgccacgcagcgcagatgtaaggtgacagtgattgaactggcggcaaccgtcatgggccgtaatgcaccaccgcccgtgcaacgctatcttttacagcgccaccagcaggctggtgtgcgcattctgctcaataatgccattgaacatgtggtcgatggtgaaaaagtagaactgacgctgcaaagtggggaaacgcttcaggctgatgtggtgatttacggtattggtatcagcgccaacgagcaactggctcgcgaggccaaccttgatactgccaatggcattgtcattgatgaggcttgccgcacctgcgatcccgcgatctttgccggtggcgatgtggcaatcactcgtcttgataatggtgcactacaccgctgcgaaagctgggaaaacgccaataaccaggcgcaaattgccgctgccgcaatgttagggctaccgctaccgctactgccgccgccgtggttctggagcgatcagtacagtgataacttacagtttattggcgatatgcgtggcgatgactggctttgtcgtggcaacccggaaactcagaaggcgatttggtttaatctgcaaaacggcgtgcttatcggtgcggtcacgctgaatcaggggcgtgagattcgcccaattcgcaaatggatccagagcggcaaaacgtttgatgcgaaactgctgatagatgagaacatcgcgcttaaatcactgtaaccaggataattagcgaatatctcaacgcctggggcgtggcgaggtgcaagagtgtgtattacgtttaaatcacattatcttgcaaagggattggttatgaacacactacgttggtgatgctgccaacttactgatttagtgtatgatggtgtttttgaggtgctccagtggcttctgtttctatcagctgtccctcctgttcagctactgacgggggggtgcgtaacggcaaaagcactgccggacatcagcgctatctctgctctcactgccgtaaaacatggcaactgcagttcacttacaccgcttctcaacccggtacgcaccagaaaatcattgatatggccatgaatggcgttggatgccgggcaactgcacgcattatgggcgttggcctcaacacgattttacgtcacttaaaaaactcaggccgcagtcggtaacctcgcgcatacagccgggcagtgacgtcatcgtctgcgcggaaatggacgaacagtggggctatgtcggggctaaatcgcgccagcgctggctgttttacgcgtatgacagtctccggaagacggttgttgcgcacgtattcggtgaacgcactatggcgacgctggggcgtcttatgagcctgctgtcaccctttgacgtggtgatatggatgacggatggctggccgctgtatgaatcccgcctgaagggaaagctgcacgtaatcagcaagcgatatacgcagcgaattgagcggcataacctgaatctgaggcagcacctggcacggctgggacggaagtcgctgtcgttctcaaaatcggtggagctgcatgacaaagtcatcgggcattatctgaacataaaacactatcaataagttggagtcattacccactacgttattttgattttggagctgcccgccccgttttgttattaattgcccgtatcgccgtggtcttaattttcattatttttggttttcccaaaatgatgggctttgacggtacggtccaatatatggcctcgttgggcgcgccaatgccgatgctggcagcgattattgcggtagttatggaagtgcccgccgcgatattaatcgtgcttggctttttcacccgtccgctggcggtgctgtttattttctacacgctgggtacggcggtgattggtcaccattactgggatatgaccggcgatgcggttgggccaaatatgattaatttctggaagaatgtcagtatcgctggcgcgttcttgctattggcaattaccgggccgggggcaatttctctcgatcggcgttaggaaagatgccggatgcggcgtgaacgccttatccggcatttaataaattacagccactctacccgcaacgacatctctgaagttgttgattcccctggtgctagcgcaatgagatcacccccttccgggcgatgatgatcatccggcgcatggctcatcggttccagacagaagaaatcaaacgcatatcctttatcaaacgcagggtcggaaacaaagatgaaataacacggtgcaggtggcgtcgtttccatgatgatggcataaccttcctgcggctgctcgatgcgggcctgaccattccatccggcaaaaccattgttcacccactggcgcggcaacggcgcgagctggttaaaatccagttcctgcggtagctgctcgcaaaactcacccgccagccactgctcccgttccagccagtaaccgctcgcctgcgcctgaatccgcgtttgtggtgacaacggaaaataaggatgccagccggtaccaaatggcagcgtctctgccccttgattggtgacagagagcgtcaccgtcagcgtatccgccgttaaatgaaacgcctgacttacccgatagtgatagacaccgctgcgatgttcatacaccagacacaaactatcatcgctgtgcgagacacattgccactcgcccagccagccatcgccgtgtagatagtgcgcatcccactcaacattcggttgcagttgatactcacgcccctgccagacaaaacggttgccgctcacccggtttgcaaatggcaccagcggaaaacatgaggcatcggttgccacaccgctttttttaccaggacgtaagagcggcgtcgtatcgcgccagaagccttcgattacgccgccctggtcagaaacgtccagctttagcgacccgtgggataaggtatagatggtcatccgctaactccttaatccgggaagttaatcacaactttcccgcatttgccgctcgccatcagcgcataggcatcacctgcctgttccagcgagaagcgatgggtaatggcgttacgcggccacagcttccagtcagtcaaatcgtgggcgcatttttccatatggaacagactggtcacccaggagccgataatccgccgttgatggtgcatcagatcggcgctgacctcgaattccacttttccggtttcaccaatgtaaaccacccgtccccagtcagcggtggattgcagtgccagcaagcgacctgcggcattaccagaacaatcgagcgcaacatccgcgccaccgtgggtgagttcggcgataatctgcggcagaccttcggtggttgctaaatagccgtgatccatcacccctaactgttttgccatcgccagacgttccggcagcatatcaacgccgatgatccgttttgcaccgcgacctttcgccagcatcatcgccatcatgccgaccggccccagaccgaccaccagcacgttatcgctgccggaaacttcgccgcgcaaaatcccttcataggccgtgccaacgccgcaactgataaacgcaccatcttcgtagctcagcgcatccggcaggaggatcagatctttttcttccgccagcagatattcggcatgaccgccgtcacgctgccagccgtaagccgcttttcctttgccagtacaagagataggaaagccgcggcggcagttcgggcaaaaaccacagccagaaatgtgatacaccagcacgcggtcgccctctttaaaatggcggcagccttgccccatcgccacaatctgcccgcacggttcatgaccgttgataaatccctggtataacggtttatcgggtgccgccgccgtggcacagtgttgatgatagatatagtggacatcgcttccgcaaatcccggaggatttcattttgatcagtacctggttaatccccggcgtcggcaccgcaacttcccgcagatcgacggttgaatttcctggtaaataagctgccagcatcgttttcataaatccctcattaacaatacgattaattttcatccctgccgcacccgcgccaggggcgttaaggtttagcgtttcgctttactgcttcgctgggtcagcaagatattcgccagcaccgccaccacgatgatgacgccgcgtaccacctgctggaaaaaggagttaataccgagcagcaccagaccgttaccgattagcgtaatcaccagcacaccaagcaatgtaccgaacagggaaccgcgaccgccggaaagtgccgtaccgccgaccacgaccgcggcgatgacgtcaaactccagaccgtttgcggcacctgcgttaccggaaccgaggcgtgccgccagcaaaatgccggtcaccgccgctaataatcccgaaagggtaaagataagaatgcgcacccgacgaacgttaataccgcacaactgcgccgccgtggcattaccgccaacggcaaaaaccgagcgcccgaaggcggtttttcggctaatgaacacaaacagcgcaaacaacaccatcatgatcagcgcggatactggcacaccgagaaattgtccgcccagccagtccagcacctcgttttcgtcaatcggcactggcagtgcgttggtcataaacagccccattccgcgcagggcgctccacagccccagtgtggcaacgaaacttggtacgttaaacacgccgcgcagcaccccggcgagcgttcccatcagcgcgcctaacagcaacaccagcagacaagcaatcgccaacggaacttcaaattgcagcaaaaatgccaggcacaccgagacaaaagccaccatcggcccaacgctgacatcaatttcaccggagataataatcagcgtcatcgcccaggcggcaatcccaatggtggcggcatcgcgcagcacgttcatctggttattcaatgagataaagccaggcgcgttcagggagaagaccagataaagaatggcaatcaccaccagcaaaccgatctcattaatatggcgactgacaaattgtttgagcgagacgctcttgccctgcggcaatggtaatgacgaagcagacatcttcaggttcctcggtaaaattcatcagtgcacagacagaatggcggacatcagctcatccacattgaccggcgagtgaaactcctgcgagaacgtgccgtgctgtaataacaggatgcggtcacacaccagcggcaactcctccacttcactggagataaacaccacgctttttccttcggcagccagctcacggacaatacggtaaatctgctgtttggcttcgatatcgacgccgcgcgttggctcgtcgagcaacaaaatctggctggcggcatagacccaacgaccgatcaccactttttgctgattgccaccagaaagcgtgccgatgggcgtttcgctactagcggccttgaccgtcatccgctgcatcacctcttcggtcaggcggcggatggtggaccattgcagcactccgttggcgctgattttttgccgattggtcagcactgtattttcgtcaacgcccaaccagggaatgatccccgcttctttgcggttttctggcgtatagccaatgccgcgtttcagcatgtcgccgtaatcggggcgcgtgattttctcgccgttgataacaatttcgccctgttcatacgtctccagcccaacaatcgccttcagcaattcactgcgccctgcccccagcaggccagcaatgccaagcacttcgccgcgacgtaacgtaaagctgatatcctccagcttgggcttatggcgtaacgcacggacttccagtacggcctgatccacaatttcctgaggggcaaccggcgcaatatcaacgtgatcacgccctagcattagcgacacaatatgatgcgtggaggtgttttcgagcatcacatcgcccgccacctgaccatcgcgcataacggtggcacaggaggcaatgcggcggatttcttccatccggtggctgacataaatcaccgccacgcccagtgccgacatctttttcaccgcactgatcaccagttcaacttctgcactggcaagcgagctggtgggttcatcaagaatgaccacgcgcggctcgcccttcatcacccgtgcaatttccaccagttgcttttgcgccgggcttagcgttgaaacaagttgttcaggactaacgtcaacgcccagcgcctgtaagcaacgttgggcatcctgcgccatttgcaggtaatcaatcatgccgttgcggcgaggccattgaccaaggcagaggttttctgccaccgtcagcccttccaccagacttaattcctgataaaccgcacgaacccccagttcagcggcacggcgagtcaacgtagcttcgtcaccttccagtcgcgtctcgccaatccagatatcaccgctatccgggcgttcgctgccggtaagcattcgaatgagagtcgatttgcccgcgccgtttttacctaacagcgcacgaacttcgcctttattgagcgtgaagttaacgttatccagcgcaacgacgccggggtaacgcttatttcctgccaccacttttgctaccgggactgcctctgttgccgtgaacatagggacctctgcgaatcagcgattagggcagaccatcaacgtgcgttgccagccactgtttaccatcttccgttttggtatagagatcgattggcacctgaatcactttttcaccgtcggcttgtttattgataaccttcaatgtttgcgcgaaaacagcattgcccattttcttaccggaaatatccactaccgctttcagcacctgattgttttccagctcctgagcaatttcggttgtcatatccgaaccgaaaacagcaatttttccggcctgattttgattacgtaccgcttttaccgcgccgagtgtcgcaccgcccgactcccccataatggcgttgagatccggcgtggagataatcagtttttcaccaacggaaatcgctttatttaaaacagtcccttcctgattagcgacaatttgcgcgccgggaacgcgggattttaatacttcttcaaatcctttacgtcgctgcacacaaacttcaaaggcttcgcaattgatgacggcaattttcggctggtcaattttattggcaataaaataatcggcggcagcgttacccagttttttaccaaattccagtggatcgccgaccagatacgccgagacatatttatcgacacccttttgattaatacaggtgttgtagcaaatcaccggaatacccgcttcactggcgcgacgaacggtacggctactgccattttcagacactgccgataaaataatggcatcgacattacgcgccacgagggtatcaacaaaggtactttctttcgaaatatcaccctgggcgttagtttcaattaactgtacctgtactgaagaatcttttgccgcatcctgaacgccctgacgcactccagcgtaatatcccagggtatcaaggtatattgcaccaatggtcatttctttatccgcagccctggcaaatagtgcgctacctaatagcgtagccattaataatagattacgggttgttctcatttttttaggcatagtgcctcctgtagagtttttattaacaacggcttattctaattattttgtgatgagcggcagcgcgtgccgctcaaatattacagttaatagggtttagtgaacgtagttaaaaataaaaggcatcacggtggtgaataatgccgctttcggccaggccggattaatcgccgtcaattcagcgcgagcagattcatattgcgcaacctccccgagtcccgcggacgccagcatcgccaccatcaggcatttttctttatgctgctgttgtaaatcgccatacagcgacaacaggtcaggttgtgaaacagcaaagaaatccgcctcaatactggttttcgccatctcttgcgcccactgtttcatttcactaaacagttgctgtgcgatttgttgttcgcccagcagtcgcagcgccattccttgccagaagagataatcaaccggctgatcgttgtaataactgtggatgttaatggtgcgatcgccggtcgccgccagacgtaaacaacgcgtcgcttcagtttcatcgccctgcgcgttggcgcatatcgcctgccagaaccagatgtcgttatcagtttgccccggtaaacggccttcgcttaaattctccggataatgcagcgcggcatgaagcagttcgcaggcctgctgcggctgtctggcatcaagatgctgccaggcgcgtaataactggttgaggataaactgactggtgaccttcccttccccgccttcccacgggtggaatttgcgcgtggcgagaatgtccgccgctttgtctgcctgacccgtgagatgccacaaattgagcagttctgcggtcatgtcgtcgcgtttcagcgcaatttccagattattttccagacgcgccagtcgtttctccggtgtggctccacttaacttatccagcaaatcccgttcgaaaagcagacgtgcatcctgcggcgcaagctgataagcattatcaagataacgcgcggccagttcataatcgtgttgcttattccacgcatggatcgccaacccgcgccagccatcggcaaactccggcgacatctctacgcaacgttgccataaagtaatggctttgttgtagctgcgcttgttgtagtagaagcaggccagtaaatgacgggcaaaccagcactcttcaatactctccagcgccgccacttcttccagcgtattcgggaaacggacaaactgcgggaagacatcaatggcttttgcgaccagttcgccgcgttcggctttcggcagcaagctggcttgtagataaagcgataacgtgcgctgacagtccagtgcgttcagcatctctgtcgccagagtgggcattccccagttaatcagttgcccggcggtcatcagggcgttaacgtcgcgtccctgacacagaccgcgccactgcgcgagggctgattcgctacgaccatcgaaccagttcagccaccacagaatggcgttcagcggataatcacgcagcagtttcgcgcgctgcaaacgcgcgttgtcctgacgaccacttaacaccagcagcagattatgcaggcaaagcacttcctgattggttgggcaggcgcgaagactttgttggcaaaaatccagaccagcgtcgaagttaccattacgcgccgccagtcgtgccaggccataatagccaccggctttgctgttgccgctccagaccgcacgccagaaatcctcttcggcttgttgatattgtccctgacgttcgtaagcactggcgcgaatcaaacttgcttgtccacactgcgggtttttgttcagcgcatgtgcgcgtttcagcgcctgactggcatacgccaccgcttgcgggaaatctgcgcggttatattccagcatcgccagcgccaggttacagcgataatccagcgggtccagcgccacgccgcgcaggtagtaatcgaacggtgaacggctggcgtgatgatattgctccagatgctgaccgataaaccaggcttcatctgtactggtaatgtcttgtgctgccagtggcgctttggcgacgtccggtaacggcaacgcttgcggctgatgttcctgataactcagtacaatattgccgtcggcatcggaaagctcaatggtcagcctatcaggattgataccgtgcaacacgccctggatggcggtcgcaggcatcagtgccacggcatcatcaagtaacgcgttgcatttgccgatttcgtggatcgccaggcggtatccgttcaacggagagatggcatacagcccccactcaatcccctgctcactacgctggagttttatcaccgcatcgcgggaggcattttgcaccatgcccagagaatgataaggcaggaaatactgctcaaaacgcttctcttcgtaagcatcaagccaggtaaaatcgggctggttatcggcaaaaataccggtcatcagttcgatatacgggccgttattgtcggtcagactcttatcccacgcctggccaaattcactgtgtccccaactccactgttttttacctggcgcaatatggtggttggcaacgtgcagcaaaccgccatcttcatcgtgacaccacgcgccgacaaaatcgtactgcgatttttcggccatatatgaggttggaacgggcacatttttatagcgagaaatgtccactccagcggagtagtccactttgtagtaagtgccggtagcgatggggaaagcggagacggcccgtttgccgtgatcaaacaccgcagtcaaatccggtgggaaaacgctctgatgcccttcaccccctttcactgccgggttggcccaccacaagaaatgacgcggcgtggcgttgccgttatagacgcggctggcgatttccagcgccgcccagggcgcagggtgaaacctgtcatcacctgtaaaccatgcatcggctccgtttcgcctacccacaccgtctgtgcaccgtcttcatgggcttcgagggtgaaatcaacgggcataaaggtggtcgggcgatgatgttgcggccagttaaactcaatcccaccggaaatccacggccccagcagccccaccagcgcaggtttaatgacttcattgtgataaacaaaatcgcgctgtttcactttatcccacgcgcgatgcacccgaccgcccagttccggcaggatcatcactttgatgtagtcgttttccagccacaccgcctgccaggatttcagggttttctgctcgctcagcgtatcggtcacgccgtagggataaaccgcgccggacgatccctgataaacgcgattttccaggaacatgggatgtatatcctgcggcccggtttcataggtcgggatctcaacgcgctcttgccacacttttactggagtcatggtgccctcaatattaacaagacatactgaattaaaagatttgtggcagtgtattgaacaatctggcaatgttttcgcggaataatcacgcaattaactaaacaaggtttagtgaagatgagagcctgcattaacaatcaacagattcgccaccataacaaatgcgtgattctggaactgctgtaccggcaaaagcgcgccaataaatcaacgctggcccggctggcgcaaatttcgattccggcagtcagtaatattttgcaggaactggaaagcgaaaaacgggtggtgaatatcgacgatgaaagccagacgcgcgggcatagtagcggtacatggctgattgcgccggaaggtgactggacgctgtgcctgaacgtgacgcccaccagtattgagtgtcaggttgctaatgcttgtttaagtccgaaaggtgaatttgagtatttacagattgatgcaccgacgccgcaggcgctgctgtccgaaatcgaaaaatgctggcatcgccaccgtaaattgtggccggaccgcaccatcaatctggcgctggcaatccacggtcaggttgatccggtgaccggcgtgtcgcaaaccatgccgcaagcgccgtggacaacgccggttgaggtgaagtatctgctggaagagaagctcggcattcgggtgatggtcgataatgactgcgtgatgctggcgctggcggagaaatggcaaaataattcgcagaaacgggatttctgcgtgatcaacgttgattacggcattggctcgtcgttcgtgattaacgagcaaatttatcgcggcagtttgtatggtagcggacagattggtcacaccatcgttaatccggatggcgtcgtctgcgactgtggacgttacggctgcctggaaaccgtcgcctcgttaagtgcattaaaaaaacaggcgcgggtatggctaaaatcacaaccggttaatactcagcttgatccggaaaaactgactacagcgcagttaatcgctgcctggtagagtggagaaccgtggatcaccagttgggttgatcgcagtgccaatgccattggtttgagtctgtataacttcctcaacatcctcaatattaatcagatttggttgtacggtcgcagttgtgcctttggtgagcactggcttaataccattattcgccagacgggatttaacccgttcgaccgcgacgaagggccgagcgtgaaagcaacgcaaattggctttgggcaattaagccgcgcacaacaggtgttggggattggctatttgtatgttgaggcgcagttacgacagatttgatggcgcaataacgtagaaaggcttcccgaaggaagccttgatgatcacatacctaagattgcctgatgcgctacgcttatcaggcctacacggatattgcaatatattgaatttgcaaagttttgtaggccggataaggcgttcacgccgcatccggcatgaacaacgagcacattgacagcaaatcaccgtttcgcttatgcgtaaaccgggaaacgtgcgcagatgtcgagaactttacctttgatgcgctcgataacggcttcatcattgatgctgtccagcacgtcacacatccagccagccagttctttcgcttctgcttctttgaagccgcgacgcgtaatcgccggagtacccacgcgaataccggaggtcacaaacgggctcttcggatcgttcggtacgctgtttttgttgacggtgatgttagcacggcccagagcggcgtctgcttctttaccggtcaggtttttatcaaccagatcaaccaggaacaggtggttatcagtgccgccggaaaccactttgtagccgcgctcaaggaacacttctaccatcgctttagcgtttttcgcgacctgctgctggtaagttttgaactcaggctccatcgcttctttcagagcaaccgctttaccggcgattacgtgcatcaacggaccgccctgaccaccagggaaaacggcagagttcagttttttgtacagctcttcgctaccacctttcgccaggatcaggccgccgcgcggacccgccagggttttgtgagtggtggtagtaacaacgtgagcatgaggaaccgggttcgggtagacgccagcagcaaccaggcccgcaacgtgcgccatatcaacgaacaggtaagcaccgatgctgtcagcgatttcacgcattttcgcccagtcaaccacgccggaatatgcagagaaaccaccgataatcattttcggcttgtgttctttggcttgtttttccagatcggcgtagtcgatatgaccggtagcatcgataccgtaaggaacgatgttgtacagtttaccggagaagttaaccggagaaccgtgagtcaggtgaccgccatgcgccaggttcatacccagaacggtatcacctggttccagcagcgcggtgtagaccgcaaagttagcctgggagccggagtgcggctggacgttagcgtagtcagcgccgaacagttctttcgcacgatcgatcgccagttgttcaacgatatcaacatactcgcaaccgccgtagtagcgtttgcccggataaccttcagcatatttgttggtcagctgagaaccctgcgcctgcattacgcgcgggctggtgtagttttcggaggcgatcagttcgatgtgctcttcctgacgtactttttcctgctccatagcctgccacagttcggcatcataatcggcaatgttcatttcacgctttaacatccgcatctcctgactcagctaacaataaaatttttggcctttataggcggtcctgttggacaacggcgaacagtataaccgaatcattgtgcgataacaggtcttgacaaaggaatttacgcaaacgattaccttcaggctacgcaaggctttggagaataaagagcttgcaaccggaaacggatttcttttcaggtttgtgatgcaaatttttcacttcatcacattctttctgaaaaacaccaaagaaccatttacattgcagggctattttttataagatgcatttgagatacatcaattaagatgcaaaaaaaggaagaccatatgcttgacgctcaaaccatcgctacagtaaaagccaccatccctttactggtggaaacggggccaaagttaaccgcccatttctacgaccgtatgtttactcataacccagaactcaaagaaatttttaacatgagtaaccagcgtaatggcgatcaacgtgaagccctgtttaacgctattgccgcctacgccagtaatattgaaaacctgcctgcgctgctgccagcggtagaaaaaatcgcgcagaagcacaccagcttccagatcaaaccggaacagtacaacatcgtcggtgaacacctgttggcaacgctggacgaaatgttcagcccggggcaggaagtgctggacgcgtggggtaaagcctatggtgtactggctaatgtatttatcaatcgcgaggcggaaatctataacgaaaacgccagcaaagccggtggttgggaaggtactcgcgatttccgcattgtggctaaaacaccgcgcagcgcgcttatcaccagcttcgaactggagccggtcgacggtggcgcagtggcagaataccgtccggggcaatatctcggcgtctggctgaagccggaaggtttcccgcatcaggaaattcgtcagtactctttgactcgcaaaccggatggcaaaggctatcgtattgcggtgaaacgcgaagagggtgggcaggtatccaactggttgcacaatcacgccaatgttggcgatgtcgtgaaactggtcgctccggcaggtgatttctttatggctgtcgcagatgacacaccagtgacgttaatctctgccggtgttggtcaaacgccaatgctggcaatgctcgacacgctggcaaaagcaggccacacagcacaagtgaactggttccatgcggcagaaaatggcgatgttcacgcctttgccgatgaagttaaggaactggggcagtcactgccgcgctttaccgcgcacacctggcatcgtcagccgagcgaagccgatcgcgctaaaggtcagtttgatagcgaaggtctgatggatttgagcaaactggaaggtgcgttcagcgatccgacaatgcagttctatctctgcggcccggttggcttcatgcagtttaccgcgaaacagttagtggatctgggcgtgaagcaggaaaacattcattacgaatgctttggcccgcataaggtgctgtaatttgatgttgccggatggaaacatccggcaacccttgacgcggtttaaattgccgcgtcgtcctcttcaccggtacggatgcgaatgacccgtgccacgtcaaagacgaagattttaccgtcaccgattttgccggtttgcgccgtgcgaataatggtatcgacacaggtatcgacaatgtcgtccggtacgacaatctcaattttcactttcggcagaaaatccaccatatactccgcgccgcggtacagctcggtatggcctttctggcgaccaaagcctttcacttcggtcaccgtcatgccggtaataccgacttcggccagtgcttcgcggacatcgtccagcttgaagggttttataatcgcatcaatctttttcatgctattccttgaaaaggtcgcctgtcttttgatctgctaaacgtaacacataacgccaattcattccttgaaatcgtttgcatccagctcgtgtcgggaaagcagtttataaaattctgtccggttgcgccccgccattctcgccgcgtgggtgacgttgcctttggtgatttgcagcagcttacgcaaatagttgagttcaaactgattacgtgcctcaacaaaggttggcagcgccgtattttcaccctccagcgcctgctccaccagcgcatcactaatcaccggagatgaggtcagcgccacgcactgttcaatcacgttgaccaactggcgcacattacccggccagctcgcggtcatcaggcgtttcatcgcatcggtagagaacgcgcggacaaacggtttatgtcgctctgccgcctggcgcaacaggtgatttgccagtagcggaatgtcttctgtgcgctccgccagtgccggaattttcaggctgacaacgttgaggcggtaatagagatcttcgcggaattccccgcgcgccatcgcttttggcagatcacggtgagtggcagaaataatccgcacattgatatcaatatcgcggttactgcccagcgggcgcactttacgctcctgcaacacgcgcagcagtttgacctgtaacggcgcaggcatatcgccaatttcatcgagaaatagcgttccgccttccgccgcctggaataaaccttcgcgattgctgacagcgccagtaaacgcgccacgcgcatgaccaaacagctccgactccagcaattgctcgggcaatgcgccacagttaatagcaataaatggtttgctgttgcgcgggctggcgttgtggatagcctgggcgaaaatctctttcccggtgccgctctgaccgttaatcaaaacgctgacgtctgattgcgccaccagccgcgcctgttccagcaaacgcagcatcagcgggctgcgggtgacaattgcctcgcgccagcgttcatcggtggctggcgcggattgctccagcgcatcgtcaattgcctgatatagcgcatctttatcgacaggcttggtgaggaaactaaaaacgccctgctgtgttgcagcaacggcatcggggatagaaccatgcgcagtaagaataattactggcattcccggctgcactttctggatttcagcaaatagctgcataccgtccatttcatccatccgcaggtcgctgataactaaatctactttttcgcgattcagtacccgtaatccttcagcgccactttccgccgtgaccacactgtagccttcgctggtcaggcgcaggccaagcagtttcagcaatcccggatcgtcatcgaccaataataaatgcgcaggtttatggctcatcaggagtgacctcatgggtggatggcgcgggcttttcactctcgtgcggcgtatccggcgagaaatttccagtcggtttgcgggtcgagagctggcgttcaatatcggtcaggttttccagcttgcgggtggtgagttccagttgctgctgtagaacgtgatgttgctggcgcaatgtatccagctcgctgtcgctggactgctggagtttactgtaacgttggcgctcttccgccagttgcagttgcagcgcctgaccgtcgcgccagagttgatacagtgggcgaacctgtgccgggatctcggtacttaacgcttcaatacgcgcgaccagctggcggcgctcatacggcgtaattttggcgtcggcgagcaaaatcccttgtttaaaggtattttgccagctgccgtcgtcatattggcgagcttgctgacgcgactgcgcaggcattaaacgatcagcacaatccatcgcccgcagccagtaaagcggattggtttcggttgatttaccttgcagcgcccagatgtcgctacattcagtagaaagatagtcagccagttgataaaccggaattttttcttctgctggcgtatcaatggctggcttattgtgattctgcacgcaacccagcaatgccagacatggcagccctgccagccacagccgtcggggcaataatcgttgaaaaatgtgtcgcatattcaccagacttaaagcctatcccagtgggcgtaattgttgcagacagtctggacatggacagcgcggagaaaccggagcgtacatatcgtacgtgaagatttcgagcactgcccggggccgaactgacaaataaaatagcctgataggataggctgttagcattatttcgtgtttttcgacgacggtaattcaatgcggaaacaaacgtcttgcccgctctcgtcgaccagatacagttccccttgcatacggcgaatacaatccctggcaatgcttaatcccagaccgctgcccttcaccgccccttttcgctggtggcttccctgaaaaaagggttcgaagatcatggcgcgttcctcttgcggaatgggcgtgcctgtattgatgacatcaatataaacccgcgcaccatgtgaactgctgcgaaggcaaatgttaccggattcagccccgtagtgcaccgcattggagtaaagattatccagtacgctcatcagcagcattggctccgccaggcaagctgttgctttgagatcgacgtcggtatgcatcattttagcccgtgcgggcaggctatgagcagaaaccactgtctccaccagcggtgctaattcaacattctccagttccaccgcactgtccgcctgtttacggttgtaatcaagcagttgttcgatcagtttttgcaaattgcggctgctgctatcaagaatgctcaccacctctttttgctctggcgtaagcggcccgacaacctggtcagccagtaattcagtgccctcgcgcatactcgccagtggcgtttttaattcatgagataaatgtcttaaaaattgatggcgttgggattccagccatgacaggcgctcacttaaccaaagaatacgttgcccaaccgagcgtaactcgctcggtccactgaacgaaacgctattgcccagagaacgcccttcccccagacggttgatcatgcgctcgatatttttcaccggcccgataatcatccgcgtgaaaagtagcaccatcaccagactcaccagaaatagcaccagcgattgccaaccaaaatattgcccacgttcggcgatttcacgctgaagttgctgcccacgagagaacaccactgtgcgcgtggcctgcaccatttcggtattggcactggcaaaggcttcaagacgcgcggcggcggcagcatcgggaccactgttgttacactgaagttgggccagattgttcaaatcctgacgcaatgcctggtaaagtttatcgtctggcagtacgcctgcgtgggcatcgagcatttcgctgtaacgcttgcgctggctttgataaaccttcgcaagcgtagggtcgtccagcacgcaatactgacggtagctacgctccatctccagcgccgcgttggtcatcgcttcactacgccgggcatcaataagcgtagtgcggttaaccagcgccgcctgatcgctaagcgcattcaggctttgccaggcttgccatgccagcaccaacaggggtagtagaattagcaaaaatgccagcattaccagttgtcgtaatgagcggggaaaaacgggccagcgtttcaaggtgttactctcgtcagacgcgaatagcctgatgctaaccgaggggaagttcagatacaacaaagccgggaattacccggctttgttatggaataaggcggtgcctaactcgacgtttcgcccgatggttgatatagctacgctgatatcagaagttggacggcaggcaccttgttgtgcgtcattcgaattttatgtagcacgtcccgaaggggctgacataagtcggtgaatgagccactgcttactattatgcagtaactgtgccaataaagaaaatagtttggtaacgtactgattatacgttgctttgagggatttatggcttcttcgctatttgaatgtaaatcagccactgtgtcgctaaaaagagacaacttaagataaacttattagattacaataaaatcaatcatttaagtgtcgccagaaagcgacacggtaaaccacccattgtcgtgatttacagacacaaaaaagctcccggagttgggagcttatgatagtggttggtgcttaatgccgcatccgggctgcaaaaccaatgaactgatgacttaccccaactgcttacgcgcattgcggaaaatgcgcatccatgggccatcctcgccccagttttccggatgccaggagttgctgacagtacggaaaacacgttccgggtgcggcatcataatggtgactcgaccactttcagtcgtaaccgccgtaataccgttcggtgaaccgttcgggttagccgggtaggtttcagtgactttgccgaagttatcgacatagcgcagtgccaccagccctttgctttccagtgccgccagatgcgccgcatcacgcacttccacgcgcccttcaccatgagagacagcaatcggcatttgcgagcccaccatcccctgcaacagcagagacgggctttgggttacttcaaccaggctgaaacgcgcttcaaagcgatcggaggtgttacgcacaaaacgtggccacaactcgctccccgggatcagttcacgcaggttagacatcatctggcaaccgttacatacccccagcgccagcgtttgcggacggtggaagaaggttgcaaactcatcgcgtacacggtcattgaacaggattgacttcgcccaaccttcaccggcacccagcacatcaccgtaggagaaaccaccgcacgcgaccagggcgtggaaatcttccaggcccgtgcgtccggtcagcaggtcactcatatgcacgtcgatagcatcaaagcctgcacggtggaaagctgccgccatttcaacatgcgagttcacgccctgctcacgcagcacagcaactttcggacgtgcgccagtggcaatatacggtgctgccacatcttcgttgatatcgaacgacagtttcacattcaggcccggatcggcgtcgtttgatttcgcctggtgctcctggtcagcacactccgggttgtcacgcaggcgctgcatctgccaggtagtttctgcccaccagacacgcaacgtggtgcggctttcgctgaatacagtctgcccgttggcggtaatcacaaaacggtcaccggaaaccgcctgccctacataatggacacaatcagcaagcccatgctgtgccagtacggactcgaccgcttcacggtcagcggcacgaacctgaatcaccgcacccagttcttcgttaaacaacgccgccaggcgatcgtcgcccagagaggcaatatccgcgttaatgccgcaatgaccagcaaaggccatttccgccagcgttaccagcaggccgccatcagagcggtcgtggtatgcgagcagcttacgctgtgcaaccagcgcctgaatcgcgtcatagaagcctttcagttgcgcgacgtcgcgtacatctgccggtttgtcgccaagctgacgataaacctgcgccagcgccgttgcgcccagcgcgttattgcctttgcccaaatcaatcagcagcagtgtgttatcttcggtagaaagctgtggcgtgatggtgtgacgcacatcttccacgcgggcaaatgcagaaatcaccagcgacagcggcgacgtcatttcgcgctcttcgttaccttcctgccagcgggttttcatcgacatagagtctttacccaccgggatcgtcaggcccagcgccggacaaagctcttcgcccacggctttaacggcttcatacaggcccgcatcttcaccagggtggcctgccgccgccatccagttggcggaaagtttaatgcgtttgatatcgccaatctgtgttgcggcaatattggttaacgcttcaccgaccgccagacgggcagaggcggcgaaatccagcagtgcaaccggcgcacgctcgccaatcgccatcgcttcaccgtagtagctgtcgaggctggcggtagtgaccgcgcagttagcgaccggcacctgccacggccccaccatctgatcgcgcgctaccatgccggttacgctgcggtcgccgatggtcaccaggaaggttttctctgccacggtcggcagatgcagtacgcgtttcaccgcgtctgcaatggtgatcccttcacggaccagcgcatcgcccttcgctttcagcgtttgtacatcgcgggtcatcttcggcgttttaccaagcaggacgtccagcggcagatcgatcggctgattatcaaaatgacgatcgtgcagagaaagatgcagttcttcggtcgcttcaccaatcaccgcgtagggtgcgcgctcacgcttacacagttcgtcaaacagcggtaattgatcggcagcaaccgccagcacgtagcgttcctgggattcgttacaccagatttccagcgggctcatgcccggttcgtcgcttagaatatcgcgcagttcaaatttaccgccgcgcccgccgtcgctcaccagttccggcatcgcgttagaaagaccgccagcgccgacgtcgtggataaacaggattgggttggcatcaccaagctgccagcaacggtcgatcacttcctggcagcgacgctccatctccgggttgtcgcgctgtacggaagcaaagtcgaggtcggcatcagactgacctgacgccatggaagacgccgctccgccgccaagaccgatgttcattgccgggccgccgagaacgaccagcttcgcaccgacgttgatctcgcctttttgtacgtgatcggcgcgaatgttgccgatcccgcccgccagcatgatcggtttgtgataaccgcgcagctcttcgccgttgtggctgttcactttttcttcataagtacggaagtagccattcagtgccggacgaccaaattcgttgttaaacgccgcgccgcccagcgggccttcggtcatgatgtccagcgcggtgacaatgcgctcaggcttaccgaaatcttcttcccacggctgttcgaagccaggaattcgcaggttggaaacggagaaaccaaccagaccagccttcggcttcgcaccgcgtccggtggcgccttcatcacgaatttcgccgccggaacccgtcgccgcgcccggccacggagaaatcgccgtcgggtggttgtgagtttcgactttcatcagaatatgcgccggttcctgatggaaatcgtagcggcccgtttcgtggtcagcaaagtagcggcccacttcagaaccttccattacggcggcgttatctttataagcagagagaacgtgatctggcgtggtttcgaaagtatttttgatcatcttgaacagcgatttcggctgctgttcaccgtcgataatccagtcggcattaaaaattttgtggcggcagtgctcagagttcgcctgagcgaacatatacagctcgatgtcgttcgggttacgaccaagctttgtgaaagcatcctgcagatagtcaatttcatcttccgccagagccaggccaagacgcaggttagcgtcgatcagcgcctgacggccctgccccagcaaatcaacgctggtaaccggagtcggttgatggtgggcaaacaactgctctgcatcatctaaagcaaaaaagaccgtttccatcatgcggtcgtgcagttcagcggtaacctgctgccattgttcattggtcagcgtaccggcttctatatagtaagcaacgccgcgctcaaggcggtttacctgttgtagcccgcagttatgggcaatatcggtcgctttcgaagaccagggagagatggtgccaggacgcggggtcaccagcaggagtttgccttgcggggcgtggctggcgagtgccgggccatatttcagcaggcgttcaagttgtgcgtgctcatcatcgtttaacggcgcattgaggtcagcaaaatggacatactcggcgtaaatattgtgaaccgggagcctggcagcctgaaaacgtgccagcagtttgttgattcggaatgccgacagtgcaggcgaaccacgcagaatttccatcataagtctctcgtcttctaagctttcggtgtacccaagggggggaaacgggcgtcattataaagaatctgatgcgctgacgaaaccgtttgcgtggaaataaaatcaccatcgtgaattagcaacgcgtgccgccaatggctgtaataagttgccatctggcgcaggtttacgcaaaatgccgctcatttatgagtaaacctttcactattattacgttttttcaagctgggacgcgcacgacacagagaattaactaattgaaaaaattaaagattaattatctgttcatcggcattctggcactgctgctcgcggtcgctctctggccatccattccctggtttggtaaagccgacaaccgtatcgccgccattcaagcgcggggagagttgcgtgtgagcaccattcatactcccctgacttataacgaaatcaacgggaaaccttttggcctggattacgaactggcgaaacagtttgccgattacctcggtgtaaaactgaaagtgaccgtgcggcagaatatcagccagctgtttgacgacctcgataatggtaacgccgacctgctggcggcaggactggtctataacagtgagcgggtaaaaaattatcagcctggccctacctattattccgtgtcacaacaactggtttataaagtgagtcagtatcgcccgcgcacactgggcaacctgacggcggagcaactcaccgttgcaccgggtcacgtggtggttaacgatctccaaaccctgaaagacacaaaattcccggaattaagctggaaggtagacgacaaaaaaggctctgcggaattaatggaagatgtcatcgaaggaaaactcgattacaccattgctgattctgtcgccatcagcctgtttcagcgcgttcacccggagctcgccgtagcgctcgatatcaccgatgaacaaccggtgacttggtttagcccgttagatggcgataataccctttccgccgccctgctcgacttcttcaacgaaatgaatgaagactgtacgctggcacgcattgaagagaaatacctggggcatggcgatgattttgattacgtcgatacgcgcacatttttacgcgccgtcgatgcggtactgccgcagttaaagcccctgtttgagaaatacgccgaagaaattgactggcgtttgctggccgctattgcttatcaggaatcgcactgggatgcacaggccacttcaccgacgggtgtgcgcggcatgatgatgttaaccaaaaataccgcgcaaagcctcggcattacggatcgtaccgatgccgaacagagcatcagcggtggcgtgcgttatttgcaggatatgatgagtaaagtgccggaaagtgtgccggagaacgagcggatctggtttgccctcgctgcgtacaatatgggctatgcgcatatgctggatgcccgcgccctgacggcaaaaaccaaagggaatcctgacagttgggctgacgtaaaacagcgtctgcctttacttagccagaaaccctattacagcaagctgacttacggctacgctcgtggacatgaagcctacgcttatgtcgaaaatattcgtaagtatcagattagcctggtgggttatctgcaagagaaagagaagcaggctacagaagcggcgatgcaactggcgcaggattatccggcggtatcgcctacggagttgggcaaagagaaatttccttttctctcgtttctttcccagtcgtcatcaaactatttgacccattctccctctctgctgttttccaggaaagggagtgaagagaaacaaaattaatccgtcgagggttgcgcttttttctgcgctttaatttcctggcggcgcatgcgaaagaagtcactgagcaacgccgcgcactcatccgccagtattccttccgtaatttccactcggtgattcatacccggatgatgcagcacatccattaaagatcccgcagcgccagttttcgcgtcacgcgcaccaaagaccacgcgaccaatgcgactgtggatcatcgctccggcacacattacacatggttcaagcgtgacatacaacgtggcgtcgatcagacgataattttgcatcaccagaccaccctgccgcagggccatgatttctgcatgtgcggtgggatcatggcgaccaatcgggcggttccagccttcgccgattacccgattgttatgcactaataccgcgccgaccggcacttcccgctcatcccaggcacgtttcgccagcgtcagcgcgtgacgcatccagtattcgtggctaaattcgacttcagacaaaaagaaaactccggttataaaagcgcggcgcattatacacggacgctatgctttactctattccagttgctggagttcaccgcgcggggttactcgccaacgatgctgacagaaataaagcagcggattgtcctgattactgtcgctatagccactgtacagccgcagcggagtgccgattttgcgctccagttgtgcgaccttttcatgtcccagacaacgcatcgtcaatacccaaccaccatagccacgctgaatttggctggcgataagattaacccgcggcagccagggcgtatcgaaataaaccgcttcaaccagcggctgcggagagccggtaatcaaccagatatcagcatcggaacttaacaggtaggtggttaatcgctcctgaaccagcggaaaggcggtaacattgtcgcgaaaccagcgcacgaaatcggcctgcaacgtctgtaaacgtgcttcgctgtgaccaaaagtgcacccccacagaagcagactcatcggccagcgtgccgcacgaccttttatcaataacgcaatggctataatcggtaacaacggcaggacaagtaacgcattcagcggttggcgacgcagtaaatagcgcagaaaactgccgaacatatcctgctgatgcaatgttccatctaagtcaaaaaacaccacacgacgctcgtgagttgccaaaccatactcctctggactgaaacatcctgattaattttcgctactacatagcctaacagatagatcatcacttttccggcaacaatcgaccgcatcatggctaactggaatttttaattcatggcaattagcggcaatggaatataaaattcactcgcgtgtgtctcatattgcctgttgtcgccactatttcatcgcgaggaaagatatgaacggcttacttcgtatccgtcagcgttaccaggggcttgcccagagtgataaaaaactggcggattatctgctgctacaacctgatacggcgcgccatttaagctctcagcaactggccaacgaagccggagtcagtcagtccagcgtcgtgaagttcgcgcaaaaactcggctataaaggttttccggcgcttaagttggcgttgagtgaagcgctggcaagccagccggaatcgccctccgtgcccattcataaccaaatccgcggtgatgatccgttacggctggtcggcgaaaaactgattaaagaaaatactgccgctatgtacgcaacgctaaacgttaatagtgaagagaaactgcatgaatgcgtaacaatgttgcgctctgcgcggcggataattctgaccggtattggcgcttcgggtctggtggcgcaaaactttgcctggaagctgatgaagattggcttcaatgctgccgcagtgcgcgatatgcatgcgctactcgcaacagtacaggcgtcgtcccctgacgatctgttattagccatttcctacaccggtgtacgacgcgagttaaacctggcggcagatgagatgctgcgagtgggcggaaaagtgctggcgattaccggctttactccgaatgccctgcaacagcgtgcttctcattgcctgtataccattgccgaagaacaagcgacaaacagtgcttcaatctctgcttgtcacgctcagggaatgttaacggatttgctgttcattgcgctgattcagcaggatctggaactggcaccagaacgtattcgtcatagtgaagcgctggtgaaaaaactggtctgagtaaagaatgcgcgtacaatgcccgcccggtttgtgttgttttgagagtttccttatggcgttgttaatcactaaaaaatgcatcaattgtgatatgtgtgaaatcaaataaaaacacatttattttcatagtgatacagcaatgtgttattgaatgtgttgttggatttatggtgcaaaaaaattttgcataagttcagcaacacaaagaacaccactttctttaacgtcctccgcgccctaaaggacggggctttacggcgcaaaaggcctgtgacataccacattaacttttcagtcaaccgtagcacgttcttgtatacgccgtgtctgcggttttatataaccctggctggaaacctcttatacaaaaaagtcgattcgccaacatcatagatgatcgccaccttctggcgagaaactcctgatgcaattagtcgcccggcctgcgcccattattctggtgaaagtttgggacggcgaccgccaattcgtccctgtgcgcgagcagcttccagtcctgcttttgttcgttcaacaatcagttcacgttccatttcagccagggcacccatcacatggaagaaaaagcgtcccattggtgtgctggtatcaattgaatcagtcagactacgaaagttgatgcctcgttcgcgcaactcctccaccagcacgacaagatgccgcatactgcgccccagccgatccagcttccagacaaccagtgtgtcgcctgccgataatgtcctgagcagttttttcagccccggcctttcggactttgtgccacttatcttgtcttcaaaaatcagctcgcatcctgcacagttcaacgcattacgttgtagatcggtattctggtcatttgttgatacgcgtacatagccaataagcatggtaaatccccctgttaacaagacactgcgtcaaaagtcgggggggagaattgggtgatctccttccatgggaatacacagtcattataaagtagaatgtactgtttttttaaagaaaaaaacagtacattgagatatgatttggatcattactaaatcctttgctgaagttactatgtatataagcttattttatacatgattattagcaacaaatattaccaagtcaagtagtcaggctggctaaaatagttggagatgttgtagtatcttactcaagactaatgtcttctggtataaatcctctgcattgtgaatatgtaaaacatcaaaaaaagatgaaccaaatatacgaaaaaagcaaatatacttaccagggtagaaagcatgatataacactcattcccttatggcgaatattctgaatcaccctcctcattaggagagatacattaaatacaatttattcacaatctaattccatatccatatgcgagaaattaatatgctcagaaatatttcatcctgtttatttccacatatcagcacaattacatcccccaaccattatttgtccgaatgggatgattgggagaaacaggggttaccggaagaacagcgtactgaggcggtaagaagacttcgtgcatgtcttacctctaaggggcataaactggacctgcgagccttggcgctttcctcgttacctgtactccctgcttgcattaaaaagcttgatgtgagctgtaataaattaaccatccttactgatttacctgaaaatattaaagaacttattgcaagagataatttcttaacacatatatctgcattaccacattatctaataactttggatgtgtccgaaaatcaattagagaatctgccgttattaccagacaccatcaaatcactaagcgcagagtataataggttatccacactgccttcattacccttgaatttaaaaaaacttgaggttaggaacaacgaactgcaaactcttccatctctgccttctaatcttaagatacttaaggttgcgcacaaccatcttactgaactgccccctttacctaggagactgcaacttctttttgcatatagcaatagattaagcaacttaccaaacatccaagaaaatattatcatgagaagatttttttattttgaaaacaaccaaataactacaatcccgacaaatctttttcgtttagatcctcatataactattgagattgcaaataaccccttatcagatcaaactctgctattcttaatacagcaaacttcggttccaaattttaacgggcctcagtttcgtatttccctgtcagaccaaaacagactgtttttacgccagatgttgccgcaaaatttacattcgcgccatatcagagtcatcactgaaggggggcagaactttcagatcccccctcttcccgaaactgtggcagcctggtttcctgaagcagatcgtcgggaggtttctacacaatggacttctttttccaccgaggagaattcccgggcattctccgcgttccttgaccgcctttccgataccgtctctgcacgcaatacctccggattccgtgaacaggtcgctgcatggctggaaaaactcagtgcctctgcggagcttcgacagcagtctttcactgttgctgctgatgccactgagagctgtgaggaccgtgtcgcgctcacatggaacaatctccggaaaaccctcctggtccatcaggcatcagaaggccttttcgataatgataccggcgctctgctctccctgggcagggaaatgttccgcctcgaaattctggaggacattgcccgggataaagtcagaactctccattttgtggatgagatagaagtctacctggccttccagaccatgctcgcagagaaacttcagctctccactgccgtgaaggaaatgcgtttctatggcgtgtcgggagtgacagcaaatgacctccgcactgccgaagccatggtcagaagccgtgaagagaatgaatttacggactggttctccctctggggaccatggcatgctgtactgaagcgtacggaagctgaccgctgggcgctggcagaagagcagaaatatgagatgctggagaatgagtaccctcagagggtggctgaccggctgaaagcatcaggtctgagcggtgatgcggatgcggagagggaagccggtgcacaggtgatgcgtgagactgaacagcagatttaccgtcagctgactgacgaggtactggccctgcgattgtctgaaaacggctcacaactgcaccattcataatcacatcgcataaaccacagaccggactgactccggaaaaacagaggcccgcccccgggcctccccggattcatccgtttccctgttcagcctgacagcacgcccccgcggccggatgacagactccgcttcggtaagcaaagcggtcttctgtgattccgccagttgcggcttattcattactcaacgtcaaacgcccgaattgaagccaaatcatccagaccgctcagctcctctttcatttcacgctgacggcgataaatctcatcgttgcgatcgacctgcgcctgcaccattgctgccgccagttcttccagttccggcatcgacagtttcacctgctgattatcggcatcgctccacgccatatgtgtttgtgctgtgacagattttgccagcatgactaccggggacaggcggcccagtgagttggggccagcattccagatacgaccgttccattcaaacgtgaacggcttcgcctcctgttctgtgcgccatgcttcaatttcctgacgtctggcctctctggccgcttccagcatttctggtgtcacagtgaatggggctatctcaccccatttgccactttgcagttcctgccagattcgctgacccgtcggtgcgacatcatcagcggtggctgtgtaggggactgcctggtccctgtcgtcaaaaaaaacgtcacagtctactgcgccactttcggtataacggggattaatgatttttttaatttccacggtgcattcctcacgatgtgcgaataaaaagcccgggcattgcgccagagacatgagcatccggcaccccggacagggcgctatatgaccccggtaatgaatgctctgaacatcccgtaatgaaaaattgtggggatgctatatacgttccggtgggagtactgggcactgaaatccccaccggtcccagtcgtgagcctctgtatgactgccccctgacaagtctgatgactttatcaccgtcagcttctccctggtacgcagcaataatcagcccgccaatgtcagggtctccccatctgttgcagacagagctcgccacgattctgtaaataatatcttctgtggttatatttattttcacccagccagtcagtctggatatgggccagtagcagtagcgggtgtgataaatggggccgttaatgccgtaaaaagtaagggatttggctctgtacctcggttctgttgtctcagggcgtgcatcagtccaccggatgctgagcaccccttcaaaccgtgtgtcgggtatgatgatgtcgtaggggccagcaacggaatattcacctggcagctatagcgcggcgatttttttgataccgatttgcatttcatttgataccgctgaaaaacgccgatacgcaacttatttgatactaaatcggcgcttttcttttgagttttagaatgagtttttaagcgttcattcactctctttcaaaccagttttaactgtttgtggttttgggtaaggctggactttgaatagctttgtgttaaggcgttttctggctctcttgtccagaaaccggatgtaacgaaactgacggaatttatgaacactggctctgtcgatattagcccgcagatgttcacctcgctgtcctcctcgtttgattgcattcttgcaaatctcgtgataccactcgccatcaagttcatagaatgttgtttcatgactgcctacataatcaaaattgcttgcctggtacacgacaccaagacagccacaacgctcatctgcaaacgactgaacccactgcacctgcggataaagttgtctgattagtttgagcgcgtaactgattgcccttgattcggagtttctcggcatacagtcatgcagccataaccggttaagctccatatattcgcggttctgcgtgccagttacgacgcgtgcaccattgtttggattaagggcataaccccattgcattacgccaaccagctcccgttctgaaaatatgcccagatgaaggtaggaattatttacgaaacgatggctgtaatgtttattgacgacgaccagccgggccagccagcaacttattgtctcaacccgtaactcacgggagccataaccgacgatattgtcgttatagtgaataagttcaggcgtgctgatgatacgggatgtaacttgctttctgttccccacgacaggatttccttgtgtatgtggggtgctctgtggcgctctgagatgtgatttgattgagggttttacagcgcggacatttaacttccagataactgaagctggctcgtgccagtagcttgttacaatgtcggcaccgtatgtttcgatacatggccgcataacctcctgctttgttgttgatatctttatcactcaatcgatcgacaaaaacgatcgatttgatttatttaattgatacaacaaataacacgaaatgtcattagcgaaaatttatgagtttgatcactaattttaaacggtgctgtaacgcataagtgctgaatgattgtacatttgaataccgcaaagcaaacaaatcaactaatttatagaagtcaattggttaattgccagcgtaagaggctgctatggacaatcatgtaacgacgagaaatcgaaaaatgattgaaaatgcggaaatctataatgattatttttccgattattcagatgcctgcaaatacagttcgagtgcgggagagttcatatgcttcaacttttttattaaatcttatgtttttcctccacagcaagaagatggaggtgtgccacctcctgaaatcactttgcaccgtatagcctccgtctcaatgatggagcaacaggctaatgagctgtatagcattctgggaacgattctacaaaagcgtgaatcggactaatgataccggttcatttgcctgcccggatggggaagcaggattgactgctccataagcagctatatttctgaatacgaaatactatccagcgattacatatggctggatagcggcaaagatgttttcattagtgtcaaaccggcagaggacaccaccggtttgtattgttacatcatggtactgtcagttccgggctgagccgggtctggttgctctggctgcgcgtcggttttcggctcattatcagcatcactggccgcaactgctggcccaataagttttgccagcacttcatcaacgtaagtgtcgatttgtgcctcaaaatccttgcggacctgcgctttcagcaacttatttacttcaccggaatacagtgcctgttttaccaggtcttcagtgacggtgcctttaatttctggcatgtatatcctccttatgcgggaataaagccctgcaatcagggctgggtcgggtcttttgggagcggagttacctgcgctgttttactgagtttttcagctgctgcgtcctcaattttgcggcgaacataatttctgatggccttataaccaccactcaccagatataacgcacatactgccgtgcagaaatacaataaaataagctgtaaaaatgtcattatccctcccaattattgacatggtgttgacaccggtaatatctgttaggtaaaaaggtgcactgcattttttgctttggatataacgatctttttgccgccggtttcttgttttcccttaccggcggcatttttttatcctgcttacgcgttattcacttccaccacgatactgtcaatcagtaccgggtaagtcgcatttttagtgatatcggtcacgcgcaacttgtctgccgtaaacgtgccgaccggagactgcgacagcatgaatggtgtcccgtccttaccatcaatgaccggcgtcacctcaatactgttgttaccggcaaaacggaagcccagcgtatgccattcgttattaaatgcgccgaatgaccccagcttcgtgttctgcgccgtgtttcctttgtgatacatcacgttaaggtctgtggcatcgctctgtacgtagaacgatgccagcaggttatgaccggcatttccttccagggtaaccccttgcggcagggcagaaaccggccagtacagcgccagtgcgtactgattagccgtaagcgcgccatcgagtttaaaacgacaactgacaagaccacctttacccagcaggtccgcaccattaccagcatcatgctcaaggtaccagggggctcttcctgtttccttggtcagtttcattgccttacccccgctggctccggcatcatccacgatttgagccttgccacctccggcagcccaaccctgtggtgtcaaccgtccttcagactcagatgcccggtaagcaaatagcgtactcatcgtcgtggtgtctgcgggtggcgtggacggttttgatggtgtatcaggtgacggcttctcatccggtggtgtcacggtctgcccgcgcatcagttcagccgtgcgccctgcatggagcataatagctgaggccagacggtctgaaatgacgcccctgcgtgcccatgagctgaaatggctgtcacgctgtgtcgaaacaaaactgccctgggttcgggatgctgcaccgtaatacccgacagccacaatatccgggtcttccgccggagcattcgttggcgtgctctgtccattctcatccgtcaggaacggtacaaagaaaattttctgtgcttccttgcctttgtagccaccgtatactgcctcatatttatcggtgccagcgtttttccagtaatacgtggtatcaccgcaaatccacggcaccgtggtggcatttccactcacgcactgcgcagcaagcggagccaggtcagttctgaactgctgaaccatggccgtgaataaactattatgctgctggcttcctgaggcaaggtctgcctctccctgcatccagaccacagccagaagtttgtttttcgggtttttcgccagcgcgactttggtgcggcttaccaggtcctgatacagaggtttaccggccccccagcgtgaagaatcagcggaagcaccgctggcctcactgaatgagccgtcggctccagtggtgaatgctgacccgccacgacaacagggcaccagaagtatcccggcattctgtgggatatagggaagcagttttttggcaatatgcaacccctgaccgacagtcccgtactggccttttgccagatcagctttcgggtggtttatcccgctcatatcctgaacatcatgcaggcagtggtctgccggaatgatgtcgttgtatgtacacgacgtaccgttgggcgttaccgtactgcggcgtgccagttgcttaatgcgtgggtccgggcggtcaaacgaatccggtaacggcagcccctcgccgtaggccatgccatttgactgacccgcgagaatgacaacaaagtaatattccggctctgaactgctgccattcgtgctaccggaaggcccggcgttatccggtgcattccagtcggagggcgtgagcgttccggccacgtcagatgtgattggaatgatgccagtcacgcctgaactggtgatttctgcactgggattaccggataccggcattacccataatggctctttcgtgctgaagcggatcacgcagtctgcgaaggtgatcccccctttattacccgaagggcggaaagggctttcaataaatgccaccgtgccaccggcaaccttgactgaaaactctccgggcatggcggagagcattttccacttggagtctgacatcgtcttttctgcctgtttctgaattaaacagagtcagaatagcgaccgctgaaaaatatgtgttttgcggaaattcaaaaaagcgtcacggtacttttggtgacggagctggtgaggcaggaaaataacgataaagggtggaaaggccaatatcaaatatcagtgcgatttgtttacgggactcgccattagccagcaaacgggcgatttgctcccgctctttctctgtcagtttctgaggtctgccgccatgacgcccctgagcacgggcagcagcaagacccgcgcgtgtacgttcaataatgagttcccgctccatttccgccagcgcgcccattatatggaaaaagaaacgtcccatgggagtggatgtatcaatattgtccgtaatgctgcggaagttaacgccgcgttgccggagttcttctgttaaaaggacaaggtgctgcatactgcgtccaaggcgatccagtttccagaccagcagggtatcccctggccggagtcgctttaatgcgcgtttaagtccgggacgctcccttgtcttaccgcttattctgtcttcgaaaaacagctcacatcctgcacattccagcgcatttctttgtagcgccgtattctggtcatttgttgacaccctgatatacccaatcagcatacgatttccttattataaaaagccggaattgtcgcatgaggaataaaacagagttaatcctggctttcctgaaaacctcggtttacgggaaacggtaaacagggcggcgaatgctctgccatcggacggcaccgccgttgccgcgaatagactcgccaccccaagaaatattaatggggttccctttgacgggacgcaggacataaacatcacttctggtataacacagcaggatgcggattcccgatatatccaggatatcaggctgggagcagagaacaggcaggtaatgtacggtggggcatattactctgcgtacggtaatgttatggcaggcctgcagattgacagtaaagttgatgcttcaaacgattttatagcattcagacccctgcaaaaattaatcggaggtacatggattacggtatctcagttataaatagtcagtaaataatatattttaaaacagatttatttccaggaggattttatggaactaaaaaatataacccgttattatcctgaaaatatgccatatggtaataatgttcagtatttccagagtgaagatggtaaggatttctacgaatccctgccattattcaccaaaaaatataaactttgcataacacctgacagcggcgttatctgctcaatatcacaggacgcctcggcgctgtatcctgcggggttttctgtggttgaggtcgatgaactccctgaaggcacggatatttcaggaaactggaagtttgataatggcataatctcccgtattccggttaactacgcaagaaaactggaagcaatgcgccagtcatatcttaatcaggcatatgaaaaaattaatgactggagaacggagctacaactgggcaccatcagcgatgaagacagagcagcacttacccaatggatggcatacatcagtcaggtgaagaaaatggaactacccgccattaaaacagaagctgaatttaacgccattaaatggcctgagcagccacagtaataaagaaggccggaaggccttctgaatatcattatatacttgcagccgtcacccatgctccatttaacagatactgcaacggccggtaatacacgccgccgacgttatctgccgtattcttaccgacatcctgtactttaattccggtaagaacattgccgccccccagattcagatcccagctttcccatgttccgggcatatgtgcggtcaccgaccccagtcttatggcggttactgttcctgatgagatagtgatatcctgcgtcccgtcaaagggaacaccattaattgtgtgggcatttgccagcctgttcgcggcaacggcggtgccgtccgatggcagggcattcgccgccctgtttaccgtttcccgtaaaccgacgttatcgataaaagcccctttatccggaatgtctgcgccgttctgctccctgcgcaggtaacggttatcaccttcgcttttgctgtaaacatccagattattacgggcggttcccttattctccaggtcggcgagattctgatccttcgccagggcattaacgtcagcgggaccaagactgttttttgtggcaagcgtccccagaccaagataaccacgggccagacgctgggcctccgcaccggcatcagcaatttctttcaggttatttttccgggaaaaggcattcgcagcgataatggctttaatggacagcgtaagctggtttaactgcgccttatccggctgaatactggcttcagccagaatattcagcagttcggcctggagaatattcagccagtcctgaccaatccagctgatacctttttgtccgtcaccttcggtaaaccaggtggtggtattactctgcgccggtgccagcgcaggcatattcgccacgccggaattattatcaacatgaaacattaaatagtctcctcttcatggctgtttgcataaacgtaaataaacgtctgccatgcaggcttataacggttcagaatacattccagcgcaccgccttcataaatacgcagcggcgtgagaatatcatccagcacattcatattccggtagccggtttcactgttaatcgtgacaatactgacccactgcgaatccggtgagggctgaatgtcaatctgataaccaaactccgccgcaaaccggatataaaattcacggttcagcgagggcttcatccggtatttatttccggcataacgctgtcgctccgtgagggtggctccggccatatcacactcgggaagcccgagataacgctcccagtcttccagcagcaggcgcgacgtgtcagggaaacgctcggcaagcagctgtttacccgtccaggatacacgcgctgtcgaatgactgaggcccagacataatgatgccagtacggatgacggacgcttgtcccatgccagcccgtcaggcagtaactgcaacagggcgcgctgatgcggggtcagggttacagccatgtgatttctcctaccgtcagcagctcactgtctcccgcctgaactgacgtcagcggactgcgcacttcaaaatcctccagatttttcacccctgccaccgcccgccagaaagacgacggcagaaccagaccgccgggccgggattcgttatacaacaggtcggtcagcgcctgttttacggccgcctgattctccggtgttttcgggatgatcctgatgctgaagggcaccggcttattggtcagtttaaacacggtcaccgtcggccccagaggctgtccgacaggctggccggtcgccggatcatcatgactgcggatataatccgccacccgctgaacatcaccgtcaccggggaaaatgtccgggttattatcctgaacaaacgttacccccacgctgcccgcctgcggccattccgggcggcaccatgcccgcgtcacacccggcacttcacgcgcccagcgttcaaaatcatactgcgtgccgccggacggtggattctgcacccggaaaaccagacgggaaagcagctccggcacggtttccacatccgcaccaccggtgatccccgttcctgtcaccgtggccgtctggttgatccccgcctgcggtgtgataaatgtcagttttgtccctgccggggcattccccgcacgaccggcactttcggcttccacactgacattcagcgtaccggccttaccggtcagtgaggtggtgatacggtaaaccacgccatcacttcgctggagaagcacaccttccttgatccccgcatccgtggtcagcatcagctgaaccggcccgtccccccgagaggcaggcttacgcatgacgccccagaatgcacagtgtttcagcagttcggcttcatcggcttcggtcgggatgatctgacgcgcaatccaggccagatgctcatgctcctgagcagataaccctgcctgagcgtaagcaatggcattcagggtggtttcattcacacccggctgcgagccgggcaggcgctggctgatatcctgctgtgtctgcgtgattaactgtgccagcggtaaaggctgataaggcattactcccccttaagatcagcataaaaaatcatgggcctcactgaaccatcaggcagggttatgcgcaccgaaagcgccagccgcgcgtgccccacacgttctgcatgacagaccacggatgacgccacgccatcctgactgagccagcccagcgcctcatccgcataggcacgggcacggcttatcacggaggccagcgttttttcccggcggagaagccacagacgggagccaatgggacgcgggcgaaaactgtctccccaccatccccggcggtcacgcgtaccgtcagggatttcatccgatgccagcgcccggcggtcagtaaacagcgaaatcagaacggccgtcagcagactgtcatccgtcagcaggtcggcaccgttcagttgcagcgaaccgcacccctgatcccatacaattgcaatatcagccattctccggcgctcctgtcttactgcctttgccgttatcctgatgcacatggccggaataggtgatcccggcaataacggcatcagacatcgtgaacagcccgtctgatttacctgtaccatcaagcacgaaattacccttaacatgcaggtttttatccaccgtcacattgcccgtaaaggtggcctccggcgtatccacccgcatcccctcatcggcgtaaatctccagcattttgcatgtcacaataatgcgaccatcctttgttaaccgtatccggtgcccctcatggtgatacacccccgtatctccggctgtgagtccggtcgggcggctgcgccggtcttccaccacaagcaccacagtctgatcccgctgtccgcccagacaggcaaaaaaggtttccgcacccggcaggggaacgctgatctgcccgtactgctggggacgctccacatcatcaaaggtttcgccgtccatgccggtgagctgcacattctgcattttcagttcgtcatgtgtgccggtcagaacgccccggccaaacaacaggcgaataccgcgcgttaccggggcaatcaggcggctgaacacttcatcattcatcaaagctgatcccctgttttttcatctgctggcgaataaaggcatcaacatcgtcaccggaaccaccccggcccttactgtccggctctgccggaacgataaagccgtcacgcggtgccagtaccagccgggtgacttccccgttatgttcatcaagtaaaaactctacctgacagaccagcagttcagtctgttctataccgaaacgcagggctgaaacaccggtcagcagattgacatcccataaccggccatcatcccggaaccagccacgcacggtggcagaaaaccgttctgaacgggcaatcgcacggcgcatttcacgcagggcacgctgccgtgcaccggtggtgtctgtctgttgatcggcgaggatgattttcggccggtagcggccgatctgctcatcactgatgacgcccacaggtgctgccagacgggcggcggattcgctgtctccccgtttgccaccaccgcgcccgtgtccccggacacggtattcgctgtatcgtcctcgccagtccgtgttgtaatcggcatcaagcaggttatctcccagcaccagtctgtccgtctgctggcttcctgcctgggtgaacaccagatcgccgtcagcattactggtcaccagcaccccgcgatgccgggcagcacgggtcagcgcatccgccacggtttctgagttttccagcgtaaaagagctgaaggggcgtgcagccgtgtcgtcgttaacctgccagcgcacggctatcccgaagggcgcacataaatctgcggcaatctgtgccagcgtccggttgcgccactggctgccgggatggatggcggcacagtccaccaggtcgccggttttatcccgaccgctgatgctgatctgatgacgggttgcactgatccgctgactgacctgatccagccagccactgatgaccgtctgcccgttaattctgagcgtcagggactgaccggttcgcagggctgaggggatgcgctcaccgggcagcatcagccccagttcaaacgacccggccagatgctccagcgagcgacggacgctgaccgtcagccagccggaaaaaatactgccaccgatatacagttcaatcctgctgctcactgatcacctccacgctgcggccacccggaacaaaaaccggatcggggatattgtttctgcggacaaaatactgccagcgactgctgttgccggtggcacggtacagcgtgaccagtgccggttcggtggtgcgaaccatgacctgaaaagcaccgggaagatgcacgctccgtgtggttaaatcttctgtcagcgcaagccctgcatcacgtaatgcaagggcagtcccggtatagccctgtgcggacagatccagcacctgttgttccatggcatcgctcaaatcccggttgatacgctgcacatcagcagaactttccagccaggccagtccgcccgaacggtcagtatcctgaacgtgcgtcgtattctgccggatgacctgatccagcagttttccgagcgtctgtgcctgcgacaccagggttgcactctgcatcacgctccgcagcagacggatatttttctgtgccgcaggcgtcaggccaatcaggcgctgtggatcatcctgttcgctgagggtgtaacgcagagaggaaagtgtgcggtacagctgcggcatggcctgctctgctatgctgtcacggtttgtggtcaggctgccggacggcgttccggcttttccggtcagagacagggaaggatcgtcgggcagcccggtcagcacggcaaacattccggccagcgattcagccatgcgacggggcgcattaatcagggcggcggcattgcctttcagggcagtaaaactggccgtaaaggcactgatatcctgcacaatccccatccccgaaacggcattctccagtgcatcaatcttatcgctgatggtgtcggtcatggcctgtacatcatgcagaccgtctgaaatcaccgtccagccgtctgaaagcgtgttaaacagctgattcattgctgagccgcttttctgctccagcgcagctgccgtatcttctgccaccgcaggggcggtatcgtcactggcggggatcacgttgatcgtgaactcaaccgttccctgctcgctggcgttataacggctttcaaagctgtttatcagcacgtttaacgtgccgtaatccgggtgcatcagttcaccggcaccgggtgcacgcagcgcatcacgcaggcggcttcgctgtgtctgaagatcgtctccggtcaccagaaccgtgaatgtgaactccgggagttttggccccagatcatccgcaccgccgctttcacgcagtgggtattcacggcgcacaatgttacgtccgccccgttcccgctgctcctgataaaccaggaacggtacgccacgaaaggagccacgccccggcgtgtcagtagaggccatagttccctccgttccagacgttcacatccaggccatgctgtgcggtatcatccacatcaatactgcgcgcccgccagccttcaggggccacaagctccacccgtgcggcggttttcgcggtggcctgtccgccgttttcgtcactgccgccacgcagtttctgccaggcctgcgtcagccagccccccagataatcaccgagatagctgcccaccgtggaaccaatggcaaccccgaccggaccagcagccgcccccagcgcgccaccggcgatacttccggcaagggaacccacggcaccggctttatcggctgcactggcgctgctgtccagcagtacaggagccgccatggcaccggcccacagggcaccaccacccagccgaccggcaccacggaacagcccggcaaaacgccccagccccatgcggtttccggccgccgttagcagaccaccggcacggctcatcatacgaccgaagaagccctgtttaccggcactctccgccagttgctcaccggcagtcacgacggtcgtgacaccccgtccacgtccggggccgcgttttttacggccgcgcacggttttgccgtcaccgctgaccaccacatccccgccacctgaggccaggccacccgcaggccagttggtgaccagcacgggctgaacggcagccggatttaccccggtaaggaaattcaggaaccggccagcgcgtccgggctgcgttcccggtacagtggtctgcggtttgcggaagggcgacgtcagcacggaggtcatcgccatgccatagcgtaagggggttgcgccaagacgtaatgcccccgtccccgcaaacctgagcaccttcagcgcacgggaggcgagatacatatacatcaggtactttgcggcggtctgcgcaccctgaccaatgcgatccagcgcatcgccataaccggcgtcgcgcagtgcctgaagcgtttccctgactttctgaatgacccggtaaaagccggtcgcagcgtctctggcatactcaaatccctgattcagagctgaggccgtctgtgtggccagcttatcctgtaagccgcttttctgtgccgcatcggcataatccaggaagcctttcaggctctttttcaggctgtcaaacggtccctttgccatcacctcgcgggcaaatccgtcccagacgtcgcccatcatggacgtcattcccgtccaggaattcatggcgtttttctgggcaccttttgcctgttcggccatcacctgaaataacaggcgaatgctgtccggccccagttttcctttttcgcctttctcacggatgatcttctggtttacgcccagcttatcggccagtaactggtaaacgttaatcccgtatccggtcagaatattggcgtccgctgcctggatactctggcgggcaaacatctgtttgagttgcagggacgcaccctgtgcatctgacagtgaccagccgtgatagccgccctgatcctgaagcatggtaataaagcgacgggcttccctgtcactcatgccaaacccgcgactggaggcgtattcctgcataacccccgccagcccccaggtggtgtctttggcgttctgtactgcccaggctttcactgcttccgtttttgccgtatcgccatgattaatggcgttgagacgcagaatatagttctccatctctgcggccgggcggataaaggctttattaaaaccgtagaccgcagcccctcccgccagcatcccgtaaaggttgcttatccgcccgatggtgccggtaatgctgccctgcaggcggtcaaaatctgacgttaccgtgcggatgctgccacgaacaccggcaagcgttcgctgcatacgggagccgacaagttctgtttcctgaccggcccggcgggctgcatttccaagaccacccaggcctgtcctgccggaacgggagaacgcccccagctcctgtgaccactggcgggatttggcggaaatattgccgagtaaatcgacaatcagggaggctttcaggttttttgccatgggttactgcttcgttctgagaattttttcggtctgtcggcagtgccggtaaagctgcgataaagggaggttaagcgcccactccgggccgctttttgtcaccatccccagcacaattgcggcttcttcaatctgatcccggcactgcatctggtcgcccccgttcagcgaccagctttcctgccatcgcggaatcaagcaggcttaccgccgccatcagacgggagagatcgcgctcgctgagctgtccgatctgacgcggagacaatggcccctcaatctggccaacagcggcaatctgacggcgcagcagtgcaatgccgcgcagtgccggcgaggctatcagaaccgggccgccatttcgggtttccataagacgctcggcctcggtttccgcgtcaatgctgtctttcgccgtcagttcgcggaaggtgacgcggtattcacgggattccccgaacggcagaccgtcgagcagatccacatagccgttcgccagctgttcagccagcccggcggtgcggggatcgccgtcttcaagtgcatcccggatagcctccatcacggcctcgtcagaaaccgccgtttttttcttacgtgtggtcattgcatttttcctgattactggacacgggtactggtggcgctggcgaacttcgcggagatatcaccgccaccgtcaagcgaggccggttcactgctccaggccttcgtcatcatatggacttcaccggtatcggccacgaactcaatcgtgaccgcagtccaggtgttgatttcatcggcagccggtgaaccttctccgccagccggaaatttacagtccagcgtcgcctcacggggtttctcacgatagccatagactttcgcgcctttcaccacttcacgctcaaagccggacggggagaacgtggctccctcaagggtggcgtactcctgtccgttcacacggatggtggccgtgccctgatgctgttttccgctcatgccttacctcacaaaatgaaacggatctgcgcggccatgaagcggaactggttaaccagatccggtgtacacatcacatccagacggttacggtcttttgtgttgcgctccacgagcagattctttttaaaggtgtccagattttcgaccagcccgagttccacccattcttcccccagtgcaatcagctggagcgtcataatctccggcgtcacgatattctgaccgggccggacgggagtaccgttatcggccagtttgtggcgcgggaaacgctgcgtgataaaggtgcgcagggaataacgcagatatgacagggtgtagatggtttctacatccagatagctgggatcgctttcgccgtatgcattctgacggtacatcgtcacctgacgttcaatctgcaccacatcagcggccgcaacggtcaccgtggacatgccggtataaagcaggctgtttcgctcttcccgcgtcagacgatccggtgcttcaggtgccatacgggcaggcagcgccagtgtctgtaatggtcgggccggatccgttgacagggagggcgcacagaccgcacaaatggaggcagcccagacataatccggctctggtgctttaggaatagaagtgcaggtaaacaggaagtcattacgggattcaccaaaactggttgccgtaccgaaggtgccggtatgcgccatccagaccataccgtccgacatttttaccggtccccagcgtttcagcagttcatccgccagaattttgagatttgccgcatccttatagggcatgacgatgtagttgtactgacgattccccatccctgagacgctacgggtgatatcggggtttgttgccttctgtgttggcgcgacgagctccagcgtaagaccggccggtgtagtttcaccgtcataatagttcacccgtaaatcatgagctgagcattcaccgataaagcgggcgttaacccccatgctgcctttaagtccttcagcattatcaccactgacttcagctgcgatagcagtgaatggcgcatcagtgtcagcgttaatgaccttagccagctcttccacaagctctttaccttttttccccttactgacgggcaggaggtaacggcgaccgccgatgtaaacacttaacaccccgtctgccaatgctgttccaatgatattcatcacgcatgccctggactgacctgttccagccccctgtgcaatggcatataactctgtgtcagggttaatggcgataaattcctctaccatcagtgcaatcatggaacctcgcccccagagttctcttgcttgtgaagctcgggtaatacgtactggtacatcaagctgaccgcgcccctgaatggtggtgtctttcattgcagcctgaccaaacaacagtaccgcctgacgctgtggtggagtgccggtcacggccattgaattattgatttcaatctgtaccagcggaatgcgattgttatcgccgatataatcaaagttaatcatcaggacgtccccttatctgatgctgcggttttttcagccaccgccgcagttttttctgctgccgctcccgctggttttgccgccgcgccggtattacctgttgtggcagccggggcaggctcctccgttttatccaccacaatgacgtcaccatcattaagacggcggcaccagaacggagtgaagggtttctcttcaccgtcctgtgagagcggagtcatcgtgtcgggatcgcgaatcaggcatcccggcgcaggtttaataaaaatggttgtcatctgttattcctctgacggtccggcgttttcaccggcggcagttgcaccaggcagacggatgtgtgccttaaactccggcgtgccttccggttcggtaaaggtttcgtaatggcgcaggaaatcatccagcgagctgatatccgtcagcgggtcgatcatttcctcgcatgagaaatacagggcgtacatcacggcaccgctgcctgcctgcgtttcggtgtaaccgttgaccgccttttcaaagtaaagcggtgaggttttttctgctctgaagccgtccagcaaggtaatcaggcgggccacaatctgataaagcccgggacggctgacctcacggccattgagcatgtcgccgatgacgtagaacacccagtgactgaccagacgcccacgggtacgcccttcaccggcacccagccaggcaacatagatagccggggcgttaatcagcatggtacgcagtacgctgtcgctccagtcgccgggatgtgtgtcaacagacaccagttcattcccgaaatactcacggatacgggcgatgtacgcttgctcggtttccgtaatcatataaagcccttctggttgcgcccgaacaccgccgcatcagactgcacctgcggtaaatccccggattcaggggccgcaccgtctgtatccacgccgaccggcacgttaccgttcatgacatctttcagccaggccagcgcctcacggtaacggtcacgcgcctgatcggatgcccgctgatcgcacaggtaataaaaggcaatcgtgcagcaatgctgaacaaggaccgccggaaccaccgccagcggcagcgtgtaacgggcagacaggtaactgtcgataagggcagacgcgtccgtcagtgcccggttcagcttgcgtgtgtccggctcatccgaacggggcacggccagtaatggcctgagcaaatcctcgcggtaacgtgcccgcatatcggtttcggtggcgtaattcatgcgcgagcctttttcgcctgtctggcgttattgccggtctttttccggggagcatcctgtccggcttcggctaaatctgcaccggtctctgcatgaaccacacccgccacggctcccgcatcatcaccaggcgtctgtagtattcgtacagtgaggcatggctccgcttccagtcgggcaagctgctccggggtgacgtcaacctgctggcgtccccgcatgaacaggaaccccgcacgacgaaactgcgcacgactgcaacgcacttctgccagtaccgtgacaggactgtcaccactgacctgaaggcctgaatcatctgttgctgccacagtgtgatgttcattcatatttgccctccgcaggggccgggccgtaagcccggctcaccgtttacagataatccgcgacaaccagctccagcttgcccttcatctcgttagagacggtggtgttaccgtccgcgaacagctcgcgctccagcagctgcaccgcctgtttttccagcgaggtggggacaacaatatgggtgggtttgatgccgagtttgcggccaccgtcagccttaaagtcacgcatggctgaccagccgtgccacagcgcatccagcgtcagcggtgactgcatcatgtaggccatctgccagaagccgtagcccacattgcgacgggcggaagcaccgaacacaaactcgttatcagtaaacgcacggccttcatcgacttttgtctgggcaaccagttcggccttgcggcgatcctgataaatcagcggttttaccgcgcgggagcagtcaagcagataccaggccgggccgctgtaatccgcctgtgcaccgacagagccggtttttgccacaaacatattgctgaccatctgtgcatcaccggagccatccactttggggtaaacagggtgttcggtatcaaagaagttctggccgtcatagcaggccgcattcagaccatcacgcagtgcagcaaagaccagttcatccggttgtgccgccgcagcgcgccccatctcctggaacaacggggagtagatgccaagattgtcgtcttcaaagtcatcgcggctaatggcaacggtgccttcaaaggttttgttcacgatggcgtagccataggctttcatcttctcgatgacgcgggagccgatccactcacggaactgcgggaactgccccagccagccgtaggtgttggatttcgacgtggacggtacggtcatcgcaattttctggtactgagacggagccatggacatcccggcctgaaaatcagaacggtagcccgtcatcagggcggtgatcatcgccggtgtgatcggggtaggcattattgcatttcctctttcattttcaggaactcggcttcggttttacccagcagatgggcggcggcgatatcttcagccgacagcgcagcggtggcggtctttttatccggcacggttacggtgtcggtctgaagagtggtcagagccgcaaccggctggcgggcgtcaagctgtgcagaaagtgccgcaacaccaatctgttgtccgagtccttccatgtatccgcgttcgcttttgaaaatgcgtccttcggactcggccttatccagcaactgctccagcgtggtgctgccgtgttgtgccgacaacgcgacatattcggtacgcagggcgttatacgtctcaacgggcacgtatttcgtcagatcaatagtgccgccagttggtgtgccttttgcggtttccagctctgccgacaggctggcaacctgcgttttcagggtgtcgtgcgcatccgcacgggttttgatcccggtaagggcagacagcgccgccgtgcccagttccggtgtaaattcgtcaccgtcggccacggtcagaccgagcgccgtcagcaactggcgtaattgctcattcatggaggtgtcctttaaaggagggtttaaggcgttataaaggtcatccgccgacagtgcggcgacaggattcatgccagtcagaccggggtcaccggtaatagccagcatccgaagctcaacaggttcaccggtgatttcgtcataaccaatcaccggggaaaaccagggaaattcgttattgcgcaggtgttcaatggccggagggttccagtccggacgcacttcaaaaccccgctcttcactgaagcggaagttttccggtgaggccatgacaaaaccggcagccggtgccggatgccccttaatcagggtctggtggttgtagtcaatttttaccggctgattgagcgccacaacccgggataccatgcgctcaacggccgcatggttaatcagccagccttccgccggtttttccgggcgaccgtcacgggcctttacccgaccggctggcatgatctgacaccagtcaccgtccccgtctgcggacaggctgatggcattcagaatggcataagcaagtttgggcgtgtttttcgtcttcattccggcagcataagccggtgtttttcggggccggttttgcgggacttcagaaagtgctgacaggggaaaaatgagaaaggcgcttcacgcagattttaaagcccgttaaatacaggttagaaaatcacgacacgcgcctgaagagggtaaggcaatgcgtttgtataccttaaaccattacggcgtttctgtggcctttttaaagcgttttctgatttcgtccatgatctcctgttctgccacctgatcaaagcccatatacggacgtgcgccaatggccgccggtcccggtggcataccaggcaggccaccccactgatgaatggccgcataaggttcatttgatccaatcagcgcccaggtatcgccataatccgtggtcaggcggcgggccagatcgccgttcaatgtcaggattttgccgggcgtgtatcccttacgggtacgccacttgcggtaaggatctgaccagtcatgccagcgttcgccgtccggctctttttcctgttcaaacgccatttctgacgatgacagaagactctccgccacactgcgggccaggtcttttccgccgcccacaaactgaagccgggcaaacacccgctggagacgcgtaacgtcaacaacgacagcggcatcaatggatgacatattgcctccgcataaaggatgaatataaaataaacaggcggtcagtgtacgcttaactggtaaagtcggtgcctgcctccgggtggatcatgtatgcgggttcgacccccgccactgaccgttaatcaatttgtccttccagcacctcaagcattccgccccggatatccgatttcagcttatccatattgataacccggtaagcattcacaatcacatccagtttgtcgggctgacgtttcagactgtacggtgcattaacggcaatctgcacactgccatccttattttccacgatatacatcagatttttgtgccgtttgtcccacagcaccgcttttggctttgccagcattgccggtaagcgcccgaagtcctctgacatcagggcgatgccgtcattctgatgtttcacactgtctgcatggagcacatttttaccgctcatcgccagcaggcgggccggtggcgttcccgtccggctttccactgcctgcgcaatgctttcagtcataaagcccagcgtgcggatatcgttaccacctcgccgggtctgcatgatgttttttgcccagatgcggaacgccagctgccgctccgggctgttgttcatctcctgaaccaccatttcccgtaacgccgggcttttcacctcgatcagtttgcggatcagcgcctggtctgtgccgaacgctgccgagccggggttatatgaccagcccacatccggtgtcatggttctggtgccatctgaatatgtggtcaccggcatttctctgacttctccggtctgtttatccacgccagcctcaacattgcgggtggagagatgatcctcaccggatgaaacggataaccccattgcatccagacgagcctgagacaatggccgcacacggcagcggcagttccagccattaggtgggtagtgtgttttccagaacggatcgtcatagcggaataccagaccgttaagggcggaatgcgacgggcgggtacggctgtccatgaccgccacatactgccagaacggatgcgtgtccgtgttgttcatcatctgcgtgtaacgcccggcattgtaagccacccgggtgttcacgttgtaaatcagcgccagacgacggggactgcccagttgcacttcttccgcgttaccgtcgctgtccaccacaatctgctttccccaccatcccagcttttgcaggcgtggcgtcagcgtgcggataaatgctttctgtgaaattccctcatcaatggcccgctgcacttcggcctgtaacgtggtcaccacatccaggcgtgccgcttttgctgccgtgaatgagcgggcatgaacatccgcggctgtttcgaaccagttccagctgatatgcgcccctttgacacggaagtatgctaccgcctcttttgagggaagcgtggcggcataacctaaatcaatcccctgtgtcatccagcatccccttcatttccgcagcaaacatggcatcactgagcagcgtcatcaggcgggaatcatccatttcacgataaagggcaggcaggtctgccagcgcatccgccagcccccgcgttctgatggcatcaatgaccggctccagtaccgggtcgatggcctcctgtaagcggcgggcaggcaccgcgtcccccatatcatccagttcatcacgcggcgtgcttttcgcttccggcagtctggctgacagcgccgtctgctctgttttttcctgtttttccggtggtgtttccctgtcggtctgagccggttcattgccactctgacggacacggaatatggcttcaccgggcgtgggctgcggaataccggtctgctcacgtatccagggatcagaaatatccatccccgtactgagctgcatcaccgcactggtgattttggtgatatcacctggttcttttgtctggaagcagatacgtggcagacggcggatatcaatagtgtgcgtggtgttcagggcgtacagcggatacaccagatcgcggttcagggttgcagccagctgtcgtaaatcagaatccctgatttcccggcgcacctcgttatgtacctcacccagtgagcgcgcgcctttgtctccggcttccgtggtcagcgtgccgccgagtattgctttggagatggaacgctccccccacgaaatcatggtttcaaacggatcggcctgaccgttcgctgccgcctgaaactccagcgacatcccggccgggatgatcccgcctgtacgtcgcccgatatccatcaccgcccgcatcagggcacttttctgctccggtgttgccccggacgggtatttcccgaccttcatcggcaggccgtacacctccagaaattccgccagatcgcgcacggaatagtttttgaaaatgaacggccagataagcgtccggacaagcccggttgcaccaccgtaaccggtgcgtgaacgcgactgatgcactatccagccaaagggctgaaacgccaccccggaatggctgccgtcacgcagccgcagttcgctcaaatcatccgggttaaggcagaaatgcccgctgtcacgccagcggatggcgcggatgatgtgcattttaccgagcatcccgtgctcaatttccatgcaggaatagcccttcaggatggcatccgtggcgtcaaacagcatggcatcaaaccagtctgcggaatgcagatattcgtcgagcatttccgcgtcctttttctcattcgcgctggcgttcggtggcggctcaatactccatggcaccccctgaatggcaagacgtcgcttgcccagctccgcaaaaaggtgggtgtccttttcttcaatatcagcggccagatcggactgggcaatcagatcgccacgttcagccccgcgaaggcactgcgccgcccggttcggggtgatacccgaagccggatgttcaatataacggctggcaatctgcggaatatccagcgcggcactctgcatctccgggtcaaaggagaaaggttttccgtcagtatcaatgatgcgtcccactaccagcccccccgatcaaattcatgatatgcctcatcgtcatcacgataaccgccctccattgcccgcgaccgctccggtagcgcctgacaggctgattcatccaggatgaagccctccatgtatgacgcccggtttgccatacagagcgccacggcaaaatcaccatggcggcgggcgttcgcagccgttgcgttctggtccttcgtgcgccccttgtcgatttgcgggataccattcactaccttcacatggcgcaaatcatcaagcgtggtctgatggcgggcgacgaggatattctgatcttcaaactcggctttcagttttggcatccactcgccgtaccacttcggcgacaacatcacgcagtcgatgatgtccgggccaaaggccagcagtgcggcctctgccagatagccgccgttaccggtggcgtcgaacgccgcaccgaccagcgccggaacgcgggtcaggatgtacatcatcacctgttcctgctgggcatacggcaggttgcgcagctccacgcgaaacacctcgcgctttgccagggattcggtgatttccagcagcacaaagcaggacaggtcaccggtgcgggcaaagtcttccccgaagctgaagcgggaacggggatttaatttctctaaaagcggttttaaatgttcttcacaccaggttaaaacttccgattcacgcagccatgcggcacggctgatgaagttgtccggggcttcaaacgtcagaatcgggatgtcgcggatcatcgccatttcaataagcgcgtgggggatataggcaccgccggattttttcgggatacagccgtattcctcgtcggcatcctcacgggtcggggcatttttgtagagatcatcacgccatttctgctcgctttccggtgaccattcctgatcggtgacgtaacagatacgacggtacagcccgtccgcaatggcatcatccagggttatgcggtggacgctgtaatccttgcgcccctcgcgggcttcctgaatgtactgattaaacagattatcgacgccgttatgcgtggagataatacgcacgcgcgcgccccacatagtgagcgccattgccgccttgagaagttcatccagcgactcgtggaacgcggcttcatcaatcaccacatccccctgaaggccgcgcaggtttgacggacgggaagacaatgcctgaattttgaatccactgttcggaaagcggatcatgtaggtcaaaatttcttcttttttatcccgatcccagaatgtctgctcatacacatcagcatctgccagctggttaaaggcacgggagaacagcgcgcaggcagaaatatattccagcgccatctcctgctttgatcccacataaaacacattgcggccaccacgacgcttcggttttgcagcagtaatgacgttacgcccggcttccgcccaggtaagaccggtgcggcgggatttttccgcaatgcagacctgactttcatcctcaaaccagcgggcctgataatccagaaacaccggcatatcaccgggcaaatcaagtctgtccggcacatccacgcccagcagggctttttcaccggacagatcaattttgcggggaggcgtcatttgtatcagtgaaggagacgtttctttggctttgttcatcaggctttacctgtcagaatgcttttgattcggaactcaagctcttcagtcatcacgtccacgccactcaactcatcagtgacagcctctgccagcagcgaatgcagttgttccagggatatttccccggcaatgctgagttcagtcaactcacgacacgcttttatggtttcaggaggtaactgtgttgcaagactgaatgccttctgatgagcactactcatcagtgagcggttatctgttaccacgattcacctcctacgccttaccaagcagcatctgcctgatacggaattctatctgctcgctcatgccatccacgccgcgcaactcgtcggtgacggcgttcgccatctcttcagcaaatgcggcccggatttctttttcacgcttaatgctgcgctcggcggcactttccgcacgctgtgccgacaggaggatgtccttaataaggcgcatatccacatcgctgtcgctgttcagggattcggtggcagcacgcagacggcggtacatcagggcgcgggacatttccagaatcagtgccgtggtttcaccggtcggcttgtcccccagttcggccatcatggcttttgtctgctcgcgtaaatcacgcaggttacgggcaatcagctcattacgggaggcctcccggctgatggccgccggtgaaagctgctgctcttccggcagacccgcctcacggatcaggcggttgatttcctcgcggatctggacctgcgtcaggcgtttttcacgcagcatttccagcagcggcttacggatgctgtcggggagcaaatccaccttgcgtacacggccacgcgttggcttatccatcgttacccccttgcgcgtggtttcttcacacccggaacagtggcacgaccttccgccacatcctgaccccggccggtcagttcagcgatgaaataaccgttaacaagcgtgcgcttacgcaccagtccctgctcggcaagccaggcaatgtgggtgtgaacggtgtcgcgggacacacggtggccgtaatcatccaggcagtcctgaagcacggattcgcccagttcgccgttgtaatccgccagcgaccgcagaatgacaagacgctgatcttcagtaatgaaatcactcattgtgtttttttccttacagcctgctccagcagcagttcgttctggtgggagacggatttcagggtggcattggtggccttaagctcaccgcgcagggtggtgatttcgatattgagtctgttcacctcctgctgcgtgggcaggccggaaatccggctctccacccgctcaacccggtcggagagtttttcaaaggcctcgcgggggacaaaggttttgcgcatcagcgccataaagatccccccggccgtggccgacaggatcggcacgacataatctttaacgatactgacccacatgaccggcctccatgatgttctggcagttcacacaacggatggcatccggcacggcaaccagacgggcggccggaatgtcacccccgcagtccgcgcatgcacgcctgcccggtgtctccgccacccggcgcttacgtgtcagccggtcacaaagggcgcgttctgttgcccgctccacgactgcctgagcacaatctgaatcatccatacctttttccttacttcgtctttcctgccggaacagcagtcgttccggccatatcagtaaattcatgctgtcgctgtgcctccagacggcggatgctggccttgtccacgttgcagtttttaatcaccgccagcagttgcaggttgtaagtgaccgatgcgccaaatgtgaacggctgcggcacaggagggaccagacagtcagccagccattcagcggggatcggcaccggcttcaccggcacgtatttcacagacggcccgccgcacccggtcagccacatcatcaggcacaggaacagaggccgcaggcaccgttgccagcgaccggcggacaatgctctgctgttcctcgctgtgctgcatgttctgctgtttttcattcgtggccgccttgctgatttgtgaaatgagttgcagggtgcgttgctggtttgccagcaccagacgggcttcgtcccgttcacgcacaagcacatgattattgtcctcaaggcgctgcgtcttctggtgcattccccataccacggcagccagcacgctcatcacccccagcgccgccatacagcctccggcaatcagggccggtaagggattgttcaccgcagccacagcacaccccgcagcagcacaacggcacacagcagcgcaatcatgagcggtcgccagaagcggttcagactttcggcaaatcgtaacgacataaccattcatccgccgaacggcgggcctcaagaccggggagttttaccccctttgaataaatccagcggatatactgcttacaggacgcgggcatctgcccggcattgataaggcacaggagcgtggagttgcgaaagttcgtttcaccggcccagaaaatccaggaggccagcgccaccgtctgaccacgggtaagcggcacctgaacatgacgatcgatagccgcaaaggcccatttcatgtccttttccagcagctccagacactcttcatcagtttttgtcatccccggtttcacatccgggccggtatggccgtaacagatggtgggggtgccggtgggatcaatgtacgtggtgttttctttcccttcccagtagccggtgtagtgcgtggcaatggtgaacgtcccggctccggccagaacaagggcaatcagctttttacgcaggggtgcggggagttttggcattgttacgctgtctcatggtgttctctgagtcagcgtaaccgtgggaaaaagtgggcaggatttgcggaatatcagaaaagccgtggctgcgtgcgttcctgatgcaggcgacgctggttgcggataacggagtaaatctgcgtctctgacatctggtagtggcggcgcagggtttcaattttttcgccctggctccagcgggaaaaaatttcattattgcgcagttcggtgaaaagggattcaccgaccgggagataataaccacgcccgcccatgtacccggcctgtgcggctgcaaccttacgggcaagcattcccgcctgagcaggttcaatcccctgacggtgcagttcagcactgatcacatcaaccaggtcccgcagcgtgccgggccagttctttttcagctcatcatcaggaatatcatccagacggtcaatcagcgcgtgcagctgttcgctgtcaccaaacatgctcatctgtgtttcagccatacccgcctccggtcatcattacacagggcaagtttaaaataaaaatcccgcgctgtggcggggtttggggttaaaagggggaggattcttcatacagcctgcaaacgcgctcataactcatcactgtacgcgctggcatccccagcacatccagcatcttgcggcggtgccagcgtttgagacgctccagcacatcagaggccagcgcggggtgttgttccagccactgccagttagccacaccttcgccgccgttctgagcggccgtctgcgatttcacccagcggttaagggctgtttccccgccatcagagataaagccctgccggtgcatcaccttccagatggcgcgaattttggcggtcaccgtacccggttttaaggcccggttaaccggcttctgacgcactttaaaaccgcgttttttgaaaacatccagcacgcgggataactcatccggtgacatatcccggcaactgggtttgccggtggctgccagtagtacggatgtgtaggtctcatggtcaagctgtagatcgcgttttgcgacatgtattaaggtaatcagggaagcgcgattcattatcgtgtctccgtaacaacaggcggcatggcaacgccgcccggataaaactaaaggtatcgatatgaaaatagattacgatgaagtattaagtattctcacaacttttcaggatgctgaaacacctttccttacactacaggatctgggcatggctgaggcagaaggagaggaaaaggataaaaaagtttttcatcttatgcttctcgctgataatggctcaattgttaatggtgatatgcagtcagaaacacccaaatatattggtttctttttccattctctgggcgttggtttcagaaacacgcccattatgcttacccagcaggggcatgatttagctaacgccctgagaaaaaaaccaatccttgaaagaatcaaaaaggagtttacagacgcaccatttgatctaattaaagaagttaccaaatcaatgttaaccaggttcgtcaaagaacgtattgggattgactgaacaacttaattcagccagtaatcgcagggcggcgacagccgcctgcttgtcacttcttttagctatttccgcaagagtatgcacaatccataacggacttaacgccacggctgaatccagaatcatgtcatccataataatttctggcatatcccgcttgtcacattctttatccataaaagaaacgaatttctctgcatcttccggtttcatgcctccggcgataaggattttgcgatattcataagacgatcttaattcaatactcattattcacctgcctgcttaatctgtttccagtgctttgctacgggctatagcctcacattcaaaaaacaccgactccggcacgcgctcttttaattcacgaacaaggaaatcattaacgcgttcatgacgtcttatatttctttccttttcctcctggcgcaatacagcaaggcggtattcaacagcccggcgttgtttctgaaagacagccagtgcttttctggcagcattacgccatgcatcatcgccacatggtgcgtattcaagctgaaatttaatctcttcaatagtttctttgatttttgccagcaagctaagacagtcgcttattgtctccagcttttcattatcaatataacttctcacgcattcacctcccgtaattccggtaaagccgaaatatgacaccagtgcgtcacctgtccgtcttcatcttcaaggcaggctccggtttcttcatcaacaaaaaagccttcataccccatatggccgatgcgcagctcctgacggtgaccatactgaacaatcagcacggcagcctccatatcaggtgggaaagcatcattcagtgaatgccagggataaccgcgtaaatccccgaaataaacaccggtcagcgttccgccacagagcggcattccggcggcacacacaagaggttcatctgattcaacaaataaggtcgttatcatggcgttaactcccgtaatacagcgtcctcggcagtccggcgacggtaataaactgcgtgagcagaatgttcagatattccaaacttttcgccaatttcccggaatgacagacggcgtgggtaatcggaatcacgcagcgcacgtataagacgtacatcatcatcagatatgtgcgtgccggggcgtaactctccgcactttgttaatccagcaccaatcattcctgcccgacatctgacagaatctttattacgtccgagatattctcccatttgctggcaggtcattgttctggcattttttcgaataaacttatcttcatcaggtgtaaatcttgggtgtttatatttcagtaactccgggtatgaactgcgcaatacaccagtccggttatatacagcccagacagttctttttattctggcagcaatatccttaaccggggtggatgaataaagcgcaatcagcagcgcatcttcttcaggtgtccacggacggacatgagcgggggcgcgaccttttagtcccatgggttgtaatttcatcatgcatcaccccctgactcgcttttcagcagcataaaactcatcagacagtatttcggtcattttctgttttgcgggttttacgccgcactgaaggtaaatcacatcgtcaacgcagaaccacttcacagggccaaacaggattgccgagaaatcaatacccaaccagaacaacagcgcatcggttctggcatacgtgacgggcgaatattcacgccacagactgttcagttcatcagaggcaacacgcagggttttagggatacgtgatgtgcgcggtgtgcagctccagccattcgacgcagtcggttttcgccataagtcgcgatgaaaaggatatttgtcctccgtaaaacgcagtcccttaaagtaaaatccactgataccggatacaaataccgaccggcacgcaacattcagcacggcctcaaggcgttttgcctcatccttaactttctggcagtcctgctggtatttttgccacgcagccagcgcggaagggtttgatgttttaaagaacattacgccacctccgcagatatcccggcaggcgctgctgtccggtcaacaatcaggtagcgcagaacatgttcagtgatattccagccgcttaaaccgcagataatgacgcccaggcgtatgtcgatatacgccatcacaaactggggcacgccttctttcatggcctgctcatcaacttcagccaccacataaacggtttcacaggtcagaacgccctgagcaaattcccacgccatcgacggaatatcatgcccctcaatccatggcagggattttctgaagccgcaccactgaacatcatcagccgcagattcctggctgcatttgcgacgaaccggctgcaccgggcgggggcgcggaatatcataaaaaccgttacattccgtcagcacgcctgcatcaaccgcatcacgcagaaaataaaccatggaggatggcggcatattcattttttcagccagtacaccgcaggtcaggcggccataaatacacagccagtttttaaccccttcaagcacttttgcatcaatcatgatttatttccccaccacattattaatgacgatataaacgtatttcatatttcttaacccttattttctgttttcaggcgcaagcagtcccctgacgcgagcgccataattaaaatgaagtgatatttaattgattaatgtggtgttatttattcagtccggcgtcctgttcaaaaggctcgacataaaaactttcagcgcctttattcaccttgataccggcaatgcctttcacagcatccggctccgccaggacggcttccttgttcacttcctctttcgtgcggatgaaacgctcaagccccatacggcgcagcatttcaatcacaccttccacatcacggctgacgctgcatgatggcgttcccagccgccatgacaccgttccggtggtcagattggctgttttggttttgccgccgttcgtcagctcatcacggttggttttgcaccagtcctgaatccctttaaaaagcactttgatttgctttttaagattttcaatctgcggcgtataacgggcggtgatttctgccacttcgtcattcatcgccgtttccaggcgcagcgcctctcgctgaatatctcccagggtgcggatatcacggctgacttcttcccgggtctgcggtgccgcctcggctgcggcctttaattttgtaacgcgtttagccattttgtttttccttattgcagtgtgcctgatgctttatgcacgcggtggcgtttaatgatggcatccgctccaaaagactgtgcagatgcctgaaattccgctgagagaaactgaataattgcaggactgtgatactggagaatacttgcataaacgtcacagagtgacgtcggcctgttatccgtatcacgttctgttttcacatccactccaatcttttcatgcacttcaacacagtcattgcctgccaacttttcgtcatgcgaaacatgattaaattcaaaaataacgcgtactttgctcatggaattacccctgttgattaaattcattaccgttaataaccccggaagccatgcctctgtctttcatgaatgcactggctttcattgccacaaactctgcgaagtttctgctttctgccagcataaccaccccaaaaatcatggcgggtccattatctttcttctttattccggttgaacgtatatccagacttacccctctgtgcgtgctgccatcagagtttttgcagataacatcttccttgtattcgaaaataatgcgtacgactttactcatcctctggtcctcgttctgtttggataactgacccggcgtctaacctcacggcagaaccgaatcatggcattaaaggcttcttcctccgtcaccgcttccggtatccccggaaccagtaactgctcctgttcatcacgtccatgacgcgccataacctcaatcacatgccgtaccgtggcaggctttccggcaactatcggcaatgcaccttccggcaggacgtaaccaaactcaataagaccactcgaccacgcccatgcaatgagattttttttcacctcacacctcccagtaaaccgtgcagccgctgatgcgggtggccttcacacggcggcgcaggccgttggtctgtatggtgatttcaatttcaccggttccctgcacgttgcctaccggcggcgtggttttcagtgcaaaacgttgcggatagcgcttactgcgttccagtaccgcaccggcaagttcggtcagacggcgcgcgctgttcagggagtcgaataaattcattttgttaccgcaggattgcatattcatataacacctcatttagctgacttgtttcgcaccaacagaacggcatattccgctgtaaacttctgtcgcaccttcgcgatcaagtccggcagatatcaccattcgtgtgcggtcattaaattcaaaaagtaaatcgccacattctttattttcggccagtgaaatcaccttcacgttatcgaaattaaccaggtaaaagcgtccgtaaatatcaggaatattaaataccgccataatcacacctgtgagagtaattcagggttggtataaacctctttaaaggccgcattaatatgtttttctgtcagcgccgcgccttcaccgctggcggtgagccacgcctggttaagcgtatgtgtcagaacgcgtaacgctcccggcttttcagcgatagcctgcatgacggccagctcggcctcaccactgatcccccacgccatggcaatggccagcacatccgcctttttggccttgcgaagttgttttgtacgggcaagacggctgaacaggcgcgataaatcatcaaaggcgcggcgtccacctttaaacaatccgcgcgggttaccaataagcaccatcccgatccccgtggcgtcctgaattgcccggagttgctccagaccgtcaataccaagatgatccgcctcatccacaatcaccagtccacgcgttcccatcaggcgacggcggatggcgcgggataatgcccctttgttcgcgcgggtgtaatcaatccccagcgcatcggccagctccagcagacactccgtgacgctggagtgcgcgggtgacagggtgatcatccaggtgtttggttgctcctggcagtaattacgggcagtggccgttttacccacacccggtacgcccacaataacgttaatacagcccatcaggcgaaccgcctgaaacagtgcgcgcagctcctggactgtctgagtttccacaaactgcggcggttccggcagtgcgctttgtttattccagttctcataccaggagcgcagggaagcagccacagcagcgttatcgcctttatattttcccttacggaaagccgataatgtgccgtcggaaattcccgcctctctggcgatggcatactgcgtcagtacgccgccatcaataagttcatcaatggtcttgattacatcgttaatatcggtcatattattcacctcgcttgagacagcattctccgagactgaaacctcaaataacctgagtcacccctcgggttatttttttatttcaggccagcggatcactttcttttaatttcgcttcgagcagttgcaatccccgctggaaattacgctcgtattcttcatcaggttcatcgtcagcgaccggttgctgaacggtcaccgtattacccacagggcggtatatgttttccagccagggctcctgcggcttgtgctccagcacgttgacaacctcatcctcggcatcacggattttttcctctgcgcgtttacgcatgcctttaaggcgctgctgctgtttgtagtattccgcgctgacagggaaggcttcgcgtttattgccgtcccataccgcctcgcaaatcacgctgccatccgggcggcgcacggtaattcgttcggcatcatgaatgtcatagctgataagtaccttacggccatgctcgtcacgcagctcgggcgcgtagtaaatattattcagccagcgtatttcacagcgtcttacagggcgctccaccatcggccggaacatatcccgcagttcaacatcggacagccattcaatttccgtgtcctcttccgccaggcgtttttttctgaactccgccgggctgtaatgtttaccgttcggcttcatgggtaattcatcgtgcggccggttgttgtaccactcaacaccgtcacgaatggcatcaatcagttcagaccaggacggtaaatcacgcatcgctgactgctgccgggcgttcagccgtttgccctgttgcagggcactgaatgccgagcgtaaatcgcggttggttttacgtaacgtctcgcgatctgctcctttcccgaaataggtgcggtatttacgggctatgcgcatcggtaatgtgcggttaagccgttcgataatgccccgtccctgcggattaccggcaatccctgtcgggtgattaatccccagtcgtggcagtatccccacaatctccttatccaggacgtcggcggtttccccggagccattatccgagtaatacagaaacggtttgccatgatggcgaataccgtgctgtatggcaccggctacggcgaaaacattttcagccaggtcaaggctccagcccaccacaaagcgcgtgccaccgtcgataacaaaggtcacttccggtgcgaatggccgcccgtgaaccgggtgcgcgcatttcagcttcatgccgtgaccgtcaccaatccagacataattcaccggcattctggaccagtcgcggcgcgtgaatccctcaagctgacggtattcactgccagttacccggcctttttgtttcaccacttccggcagtttcttcattgcgcggcgaatggtgtcataagagggcatgatatcgagcatataaggctcatcagcgtgccggtgctgccattcagcaacaaaatcctcgtaagcctcggtcattggtcggccgtttgactggcgatactgcgccagaaattcgggcagccagttaatatcttcggcttttatttcctggcgtttacccggtgccagtaaaagcaggcgttcagcggcgttctgtgccttgttaaaggccgcaatccagcgtttcagcgtgatttcactcaacgcgcggctgtttccctttttggcgttcgccgtctcaaccattgccacaatgcgctcgtccagttgtgatcgtgccaggctgttaacgaggaaccggatagccttagcgcaactaaagccgggttgttgcgcgattttcagcacctcgctgacgatcgctattcgtgcctctgccactttacgttggttttcagtcagggcattgaggcgttcgaccatcagttggggtgatccgcgatatgcctccaccgcatcaaccacggcaggtgagcgtctggcctttgtcaccaccggagccggtgattcatcggctttttgcgtcatcagttgcagggcgtagcgttcacgtaatgcctgctgcgtcacttcaggtaaacagtcgatgctgtattcagttgctttagagcctgagcgacgacgggaacaacagcttttcccttgtacgtaacgttgtaatgcctggcgaataccttttgttgtagcaggcattccgggcgcgccaatcagttcttttgcaatgacatacatatcatgacgcctttctcatatagctcttaacctggtatcgactgggccagatttcttcaggtgataccccaagagcatcagcaattatttgctgatacggtcggcaaggagtacgtaatacgcttttcagcgaatccctgctgtaaccagcctttaaagataaagagcgcagtgataagcctgccatgtgtaagcgcgccttgatgatttcaggcggccaatcgtgatctgaaacttctcttctactcatacttcctctattctaaaaagttacccgcgcggatattcgtgcggatatctgtacgggtaaataatgcatcaccaaaaataccaaatcaaggtatttttggtattttggctaatttttgcttttatccttatttttcaattggataaatagaaagaaacctttccttagaaaagcaccaagaggtatctttatgtcgcagggaaaagaacctgttattgaacgtattggaatgcttacaaagcgctacccttcaagaagtgcagctgccagagcgtggggaatcaatatcaacacattaaacagctatttcaagggaggacaaacacaaccagcccccagagaaagtatccttatacgaatttctgaaagtgaaggcgttagtcttgagtggcttaaagagggcaagggtgaattaccaaacgatattggtatttatggtaattttggttgttctggtgataagggagatcagcttacacagatgctttcattccttacgaaagacgaacgagaacagttaaccaatctccttgctcgcaaaggtgtagagacggttctgacactgctgaataaagaaaaccaagatttattacaactagaaggcaggaagcgcctggctgcgttgatgattgtagatatgccagacgattgcgtcagagagattttggaaaaaaccgagacaagtaggcaatcaaatccggtagaatctaaagcgggttagtttggcgaggctggcccgtatgttagttgccatatagatttaatgaagttttaaacgctttaaaaagttgagatcgcagtatcaaaagttttgccgattttagaataaacgattaattattgcacaatcgatatcaaatagactttaagcgctcatccagacatcacctgttttatttcagtatcttacaggtgatttcacctcctttcactaaaaccctcgttggtatcaaatgattcacctggttacacagcgcattccttacccaggccaggaaatcactcttagtgtcaaaacggataacatcttcaggcagaaaagcacacccaaagccgaatgcgccgggtatcgccagacggccttttgtccggtcgtaaatgtcgctctgtgcttccatcgtggccgcacttttcagccccagattatcccgggacttctgttgtgccttttcgcctgctgctgcgatttcagacagatggttagccgttttcagagtgccggtcagcgcagcatcaatgtcatttttggcctgctctgctgcgcgggcataacctgcggctgccgccacatcctgcgccgtctgctgtgcgtttccggctgcggccccggcgctctgctgcgcctgcgccaccatttcctcaaagcgtttgacgacatccggtttcaggtcgccctcatcaggagcaatcagaaagtcattcagcgtgccgggctttgagtcctcatatacagcaatgtcgccaacgttgtactcgttgtgccagcccggtttcagatacacaccatattttccagtccgcgcatggaaacagtattcaccatcgtttcctgtcatcacatcagcaacagtgtgcatcaccacttccggggtgtttaccgtaagcgtgcagcaagaaccgtattgacgggaatgtgttattcagtcggcagtgctacgcgccaggggagcagttcgccgacccggtttatcggccagtcggctatgacatcaaggacatagcggaggtagctttctggctccactccgttcagtttgcacgtcccgatcaggctgtacagcagcgctccccgctctcctccatgatccgaaccgaagaacaggtagtttttgcggcccagactgaccatccgcaacgcattttcagcgatgttattgtccgcctcagcccagccatcatctgcatagtacgtcagcgccggccactggttcagggcatatgcgaacgctttcgccagttctgagtgtcgcgacagggttttcatcttttcacgcagccagctttccagggatttcagcagcggtttcgttttcaactgacgttcggcaaggcgctgtttcagcaggaagatgtcgtcagaagagatgtcgttcataagcccgtattttaccgggcttattctgtgacaaccaggataaagagatttacagcatggtcagggaggtcagcagccgcttaggctgtcgccagtcgataccttccagcagcatcgccagctgcgcctgtgtaaggaacactttgccatcacgggctgacggccaggcgaagcgcccacgctccagccgtttggtcaggaggcacagtccgtcactggtggaccacagcagtttaacctgactgccgctgcggccccggaaaatgaaaacatggccggacatgggatcgtctttcagcgccgtctgtactttcgcagccaggccgttgaagccatttctcatatcggtgataccggcaaccagccaaattttgatcccggaaggtaacgggatcatcgcttcagttcctgtatcagcagagtcaggagcttttcgctgacattgccattgaagcggagcgtcccgtgccggaacgttacctcacagctgatactgagggttttcgggtcctctgcgagcgattctggctgttcggcagctgcatcgagagtcacaggaagtagctgggggctctctgaagaaggtaatagctgaggtgtactggcaatagcggacactaccatttgttctttttttaagcagccatctgatgatatttttccctgaaggctgccggggagatattccccagacgagagtgacgacgctgacgattgtagaaaatctcaatgtattcccgtattactgagatggcttcatcccggttattaaaacgatagtggctcaggctctcatttttcagcgttccccagaagctttccatcggagcgttgtcgtaacagttacctttacgcgacattgatgttttcagaccagactgctcctgtatgacccggtaatcgtatgcgcagtactgtgaacctcgatcagagtggtggattagcccggcaggtgggcgctggctcctgagcgccataaacagggctttacctgtcagctcttttgtcatgcgctctcccatggcgtagccgacaatttcgcacgtataaacatctttgatgccagcgaggtacaaccatccctcctgtgtggcaacatacgtcaggtccgccacccagacctgatttggtgctgtaggagcgaacgtctggttcagcagatttggcgcaactggcagattgtggttcgagttcgtagtcgctctgaacttgcgtttctgcttacagcgtagccttagctccttacgaagacgtgccagtcggtcacgaccaacgatgatgccattctctgccagctccgtctggagccgccgggttccatatgtttcgcgagtgcggatatgtgccaccttaatctccagttttagccgctcatcactttgttttctgtctgagggttcatgctgtacccagttgtaataaccgctcctggatacaccaaatacctgacacatcgcttcaatgggaaattgttgtcgccattgttcgattaacgcgtatttttcagcgactcctgtgcaaaatacgctgttgctttttttaatatatctcgctcaaggcgagcttcatttaacgccttacgcagttgcagaatttcagattccagttcagccaccgtgcgggaaccaggagtaccgagcccttttctggcggcggtaacccattgtcctaaagtgccttcaggaagagataatcgggaagcgccttcactgatcgaaagttgattttcaagaaccgttctgacagcttcggctttgaactctttagagtaacgttgggtttttctgctcattattagctccttctgatgccattctatttcaggaaggagtgtccgttaaactcaggctacctcaagcagctttccctcgcgccattgttgtcgccatttgaacaacagattggcgttaatgccattttcaagagcaagttttgagatggatatcccgggttcacaggaggcagcaacgagctgctgtttaaattcgggaggataattagggcagccttttcgcctgccgggagtcacatttttctgcatatctgacactttggttcccactacttatttggtggacaccactttgtctaattcgtcagattctgaccagacggttcggctgatatgactttccgtgtcaaaccggaatctctaattttgacgattttctttttaggtttaattccctgagggcgacgtagcagtaaatccgacggtgaatcacgctgatattcgcgggttggataccgcattacagaggtccgtcatatgagcctgccactttcttacgtcgcgaatcagctttgttccgccgtcgccaagcgctaacgtgggttactcttgtaccgggctacgtcgccttcagggaactggttattctcattttttatttgtgacattgtggttgttgtgcgacagacattgctattcggcccatatcccagataaaacccgccagctcacgtgcaacagcaacaattgtaatattgacattctttcctttggcctgaagttttcgatacctcttacaaagcctgagttgagcatcccatgctctgtcaatgacggggcggggtaaattttcctgccttttttgtattgccggactgatgcgtgccggatgacggtaactccacgctgcctcgaccaatagctttctggcatagctgtttccggctttggtaatgctgccctgatgtctgcttccacccgatgaatattctgatggcgtgataccaaaccatgacatcagttgtcgtggatgttcaaaacgggtcagatcacccagttcagaaattaatccaaccgcagtaataaactgaatccctcgcatggcttgcagcgcctctactaccggatacagcctccattcggtaacggcctccttcagggcggattccagccgttcacattgtgcctgccgatcttctattgtacgacggtgttcgtcaaaagctaattgtcgccagggactttcgaatgagtatttgctgagccagcgtcggtgtgcagggccccaatctgctcgcccgacataatggaccccatgaaccagaagaaacgatttcagacgttgccttgcatgccgtaaatcatcgcgggcagatgcccatgcccgggccaaatcccggaatgcctcatcttcaatgccgggtacgtagacagcagaaagatctcctgcacgcagtgaacgcacaagtctgatggcatcacggcgatcggttttaacccgctcccccggttttttcgggataagtgagggggcgcagaccatgcagtcaaaaccggatttcaccagccgacgataaagtccataaccacagggccccgcttcataaacgatactgacctgcgatgactttgacctgagacgtttacaaagattctgaatatcagtaggtgatgtgccaattttacccatcagttcaacaggttctgaattgatagcataagcgacagtaatcgattctttgtgaacatctaacccgacgtacaatgtgttattgttgttcatgctggcctccgtggtggaaataccggggtgtaacaacagctcacccatgcggctctgacaacgatgttaacccgcgttaaatatcccacgttggccagcatctgtctcacggaaagtcatactgccttacttttgtttggggtaactggcaagttttctcagcatcagggatgctgtcactgttccctgttttattgaggtcgccagacgtagcacttcacgccagtgaatttctatttctttcagattaatgcgggtcggagatatcagagaatgaagtgccggatattgatccgctttacctttaatgaaaagttttttatcgtgaaggttgaaccgccccgggtttcctggagagtgttttatctgtgaactcaggctgccagatcatcgtttccgatggaagcataataagctttttctgcttctgccggaggagtatggcccagcctttccagcaatcgtcgattgttataccagtccacccacgtgagtatggccagttccacttctgcacggtttttccagctcttacggtgtattacctccgctttgtaaagaccattgatgctctccgccatcgcgttgtcatacgagtcgcctgtacttcctgttgatgccagtaatccggcttccttaagccgctgtgtgtaggccagcgatacatactgagaacctttatcactgtgatggaccgtgccggacggtcgacgggcccataacgcctgctccagtgcatccagcacgaatgtcgtttccatggacgatgagacccgccaccccacgatgtatccggcaaacacatcaatgatgaacgccacatagacgaagccctgccatgtgctgacgtaagtaaaatcagccacccacagctggtcaggtcgttctgccacgaactgacggtttacgcggtcgcctgcggcaacggctttccggctgatggtcgtacggacctttttaccccggagaacaccggcaagtcccataaccgccatgagacgtgccacagtgcatctggccactctgataccttcccgtaacaactgacgccagactttacaccgtataccttgtgattttcatcgtatacgcgctgtatctctttcttcagccagtcatcgcgctgcgcacgggcactgcgtttatccggatgatgtcgctgttgctgacagtggtaatacgttgacggggcaatatgcagttcgctgcatagcggtccgaccccgtactgctcacgcagcttatccagcagtggcatcattttttccagaggcggtcaaactccgccttcgcaaaataagcggaagcctggcgaaggatatcgttactgcggcgcagttcacgattttcacgctccagctctttcagacgctgacgttcagcggtggtgagccctccatcaccgcccccggtatcccgctcatgctggcgaacccggacacgcagagtctccggcgtacagccaatctttggagcaatggaacaaattgtcgcccattgtgagtcatattcgccctgactttccagaaccatacggactgcccgttgacggacttcgggggaaaaacgagtatttttagtcatcctgtttacctctttctcaggaagtttagtctccaggattcccggggcggttcaatgatttttacctgtcagaacattatcagatggaacgtgcaggatggatcaggaaatgacgttttcactcagctatgaacaactgacccggtttgcggaaaaacgcatccgggaatgcaatctggacagccacggcgtaacttatctctgcgagtcagccaaagccggagccgtgctgatcttctggcatgaactggccataaatggctatacctcaatgaatgccataaagagacaggagatcattgacgccgaccatcagcgcctcagaaagctcatctggccggaggatgactggaaatgactcagagccgccgaccgtcgccactgcagcggagagtgctgattgtgctggctgcccttgatgaaaaacggccaggacccgtgctgacgcgggacatagaacgggtgctggagcaaagcggggaagccccggtctacgggccaaacctgcgcgcctcctgccgtcgtctggaggatgccggctggctgcgtaccctgcgcgctccgaacctgcagctggcagtggagctgacggacgccggccgggccgtggcacagcctctgctgctggcagaacaggaccgcatccgggcagaacagcgtgcggcagaagtcgtcgtactgccgctggtcccggcagcaggtctgcccgcaggcggcacttctgccactgatctggcggtggagctgaacggcataacgtatcaggcctgccgtggggattttgtggtgcgtctcgacggcagcacctgtctgcagttatggaataaagaaggctgggtggtacgccgggagggcgatccgctggaagtggcgcagtggctgcaggcctgtcacgatgcaggaatggaggttcgcgtacagataaatgaaagtgccgctccgtaagaacacgcctgtgcacggtttacacatcatcccatggtggcagtcggttaactttcctgcgccaccagtggaaagaggccatgagcagtccggacaaaaaaccccccgtgatacttataataatggcctcacctgccaccattcctgacggcccccagtagataaaccacattgcacatccccaggaaatgccccataagccccccgtcagcaccgtgacctgccagaacggcataaagggtaatggcggaagccggatacccagccgccagagaatacgcagaagaggaggggcataattgctccgccacatctttttgctgtccatcagggcaatggcccgggcttttttctgctcaaaagtcacaggagcacctccgttccatgatgtaaacgtgacacagcttattgttattgattattattatcatgctgtggttatgttgtcatgcatcagtacactgacaaaagtgcaaaagaaaggaaaactggcagatgaacagaaaatattattttaataatatgtggtggggatgggtgacgggaggatatatgctgtatatgtcatgggattatgattttaaatacagattactgttctggtgtatttctctctgcggaatggttttgtatccggttgcaaaatggtatattgaagatacagctctgaaatttacccggcctgatttctagaacagcggtttttttgctgatacacctggaaaaatgggattgcttgctgtttatacgggtactgttttcatattatctcttccgttaagtatgatatatattctttctgttattataaaaaggctgtctgtaagatagacagcctgtcttatattttatttaaataccccagaacttatgccacaagaattatctaaaagttgccgttctactccgttagtttgtagttctatcatagtcttattaactcgatcacgaggtctgtatgacggggaagcttgcgctgtaagattatatgataatgcacatattgtaatgatagttgtttttatctttgtgtttaatgtgaaaattttataaagcatataatgttccctatttttattttgtttataatttattggttgtatgttaaatctatcataagtctaatgattaaaatggttagtggtgtcaggattagtgaaaataaaggatgtaatatgctattctttctctgtaagtacttgagaatactaaaccatagtacaagaacgattatgtacatgtagtgagaattggaaaacatagtttcttcccgtgttaatgagagtatgtgtttttatgtggggatatgtacaccccatatagatgtattatgttatatttataatatacctcggcaaaataaaaggattgttatagaaatagggaagctataaaaaagcttatattaaggtctgttttcttcttagaaaaataattctttgttctaattattatagatgtaatcccccaaacaataaaaagaatggagctgcttgtaattatttgatatatcaaaattgttttcctctatttttgtgtagatagatgttaatggcactgggtgcaatcaattaagaaaattgacgccagactaattattaataatccagttatctttttattcatatcatctcctttccattggttaatttatcggaaattcatccccactaactaaaacgatccacacaataaaactaaatctaattgcaggcaatcaattccagtcgatatatcatctgtatggaaatcatcgctcatcactcatcgcagcctgaaagcccagagcaacggggcaggtctgcatataagtggttacacggcagaattccagagggttctgtcactaaattcagtcactgacaaatttgcatgatgttgaatagacgagattttgtgtcgaaatagttgtttcagtaactgtcactcaatcggtggtttatgtgactatattcgcaaaaactggtcgcagaaaagtcctgttttcagcttggaaacccggtaatcagaataatggataggggaacaaaaatctctgtatagaacgctccattgagggagagaaaacgtgtcattttgacccgttcggtattcagaacacacaaaaccgatcgcgggtcgctttcgtgcatagttatgcaacgcgctaaaaacgattctgacgcattttttatgtttaccctgttttttcttgtctttttgagttttttgcgtcagagagcgtctgagagggcacgtacaacgggagttatggtaaatggatcgggttttcgggaaggttcgacaggatttgccgttgggtgtagtgtaagcgactgaaaaacaaacgcccctgaaatcatgtccagatccggcagaaccagcctcatgcgcagttctggctggtttttgacgttgatcgcgagggggcagcgattgactggagcgaccggaacgctcccgcgccgaacatcaccgtaaaaaatcctgtgaacggtcatgctcacctgctctacgcgctcaatatcgccgtgagaaccgcgccggacagctcggttaaggcgctgaaatacgccgctgcgattgaacgttcgctgtgtgagaaactttgtgctgatgtgaactacagcggactgatttgtaaaaatccgttccacctggaatggcaggtgatggagtggcgagaggaagcctataccctcgatgaactggctgattatctcgatttgagcgcctcagcgcgccgtagcatcgataaacattacgggatggggcgaaactgccacctgttcgaaatgacgcgcaaatgggcttacagggcgattcgtcagggctggcccgaattctcacagtggcttgatgccgtgattcagcgtgtcgaaatgtacaacgcatcgcttcccgttccgctttcaccgcctgaatgtcgggctattggcaagagcattgcgaaatacacgcacaggaacttcacgccggaaactttcgcacagtatgtggctgatacgcacacattaacgtacgttttcgttccattggccctcaccccccgataacgacccaggtagcgcgccgtattccccccgccggccgttttcttcgacatgtacatcaggcgcggaactcatcggggcgcgggaatgaaatcccattcagactccggatagattcaagcaagcccacttatcgtcaaaatcggtgttgcaaaaacgggagtgaccatagatccgttttccaagcggaccccataatatcggctggtaaacatcactcgctagtgcattctttttgttggtaatgataatcatttacattcattctttgatgttttatcataattaatgttttgtcaataaatatatggaaacatattgtttcagatgggaatatgagaaagttcatccttatttctatgataacgttagctagtgttagtctgggagcctgcagacagaatgtcaccataaagcaggatgcgccagggcagaaagctttcctgactgacgggcagatttacgatttgcacagtggcaaaattatttctagcagcgagcttttggcggatcttgctaccgctcgacatcttattattggtgaaaaacacgataatgccgagcatcatcagattgagctttggcttattcaaaatttgctcatccagcgaccacaggggagtgtgttgcttgagatgttgacgtcagagcaacagccccgagttaaccaagttaaatgttggctgaaagataatcctgtggttcgagatagccgtgttcaggaactacttaactggcaaaaagggtggtcctgggagatgtatggcgacatcgtcatgcagctattacgtgggccttacccgctgctcaatgccaacattggccgggagcagatgttggcactgtacaaaaaaaacgaatttcctaaaggaaaaaaatccactgcacctgtggtacaagaagctctgcgtgaaaccatcatatctatgcatgaaggcaaccttgaaagccagcaactgacgtcaatgctctctattcagcagcagcgggatcgctacatggcccgccagcttctgagtgccccggtaccgtcgttgttgattgcaggtggttatcacgcgtcaaaaagcatgggcgtaccgttacacatggaagatcttgccaccggcacccatccagtggtgttgatgcttgcagaaaaaggaatgaacatcacagtagatcatgctgactacgtgtggtttgtagcgccagatacaacaaaaaggtaaaccatggatgatgaatattctccacttctcacagtcggtaaaatggagcagctggtttatctgttctctactgcttcatggactgattttccttgcgtttatctggcgtttttccgaagttcagcccgctatgtctcctgcaccggcgatcatgctgcaatgggcagaaattatagaggctccttcttctccactttcgcttccggtgggaatcgctcaacaggagtccgcagtgacagaagaaaagcaacaaactgaggacagacaacaacgtcctgtcactgaagacagtgatgcaaccattgaaataactaggaagaaaaagtcatccgatggagaaaagaaaaagacacgtccacctcgtaagataacggctcaaaccagcgacagcaaccccacagccgtttccagtaatgctgcacctcaggctctggtcgaatcgtcccgtattgctgcgccttttaacagtgactcaacaaagcgagataattctgaggcatcttgggaaagcagagtaaaaggccacctaaaccgttataaacgttaccctggcgatgccagaaaacgtgcacgaaccggcacagccgtcgtgacttttaccgtaaacacggaaggcactattgtcagtagtttcttggaaatctcttcaggaaccctttctcttgaccgcgaagctattgctgttttagaacgcgctcaaccacttcccaaaccaccgcctgaaatattggagggaggattatttaaagtaaaaatgccgattacctttaagttgaaggagtaaagggataattggccgttcaagttcatttaactgaaatttaattttcatttttatgctgaacattttatcaaacttttccactgtcgaaaaaatcaaaaagacagtagaacataattaataaacaaatagttatacttatctttattaatattatacccaaggaaatttatgaacgttataaaactggctatcggctcaggcatattattgctcagctgcggtgcttactcacaatccatcagtgaaaaaactaattccgacaaaaaaggagcggcagaattcagtccgctcagcgtttctgtcgggaagacgaccagtgagcaggaagctctcgagaaaacaggcgcgaccagttcccggacaacggacaaaaacctgcaatcacttgacgcaacagtgcgtagtatgcctggtacttatactcaaatagatcctggtcagggagcaatcagtgtgaatattcgaggcatgagcggatttggtcgtgtaaacactatggtcgatggtattacccagagtttttacggaacctctacctccggaacaacgacgcatggttcaactaacaatatggctggcgtacttatagatcctaacttactggtagcagttgatgttacacgcggtgacagcagtggctctgaagggatcaacgcccttgccggtagtgcaaatatgcgtactattggcgttgacgatgtaatatttaacggtaatacatatggccttcgttcacgtttctctgtcggtagtaatgggctgggacgcagcggaatgatcgcccttggtggaaaaagcgacgcttttacggatacgggaagcattggcgttatggctgctgtgagcggcagttctgtgtactctaatttctcaaatggttctggaattaacagcaaagagtttggttatgataaatatatgaagcagaaccccaaatcccaactgtataaaatggatatcagaccagacgaatttaacagcttcgaactttccgctcgaacctatgaaaataaatttacacgtcgtgatataaccagtgacgactattacattaaatatcattacacccctttttctgaattaattgactttaacgtaacggccagtaccagtcgcggtaatcaaaagtatcgtgatggctcgctgtatactttctacaaaacctcagcgcaaaatcgttctgacgcgctggatatcaacaataccagccggttcactgtcgcggacaatgacctggagtttatgctgggcagcaaactgatgcgtacccgctatgaccggaccattcactcagcggcgggcgacccgaaagcgaatcaggaatcgatcgagaacaatccgttcgcaccctccggccagcaggatatttcagcgctgtataccgggctgaaggttacgcgcggcatctgggaggcagatttcaatctcaactacacacgtaacaggatcacagggtacaagcccgcctgcgattcacgcgttatctgcgtgccacagggtagctacgatattgacgataaagagggtggcttcaacccttcagttcagctttctgctcaggtaacaccatggcttcagccgttcattggctacagcaaatccatgcgcgccccgaacatccaggagatgttcttctctaattcaggaggcgcatccatgaacccattcctgaagcctgaacgtgcagaaacctggcaggcgggttttaacattgataccagagatttactggtcgaacaggatgccctgcgctttaaggctctggcgtaccgcagcaggatccagaactacatctacagcgagtcttatctggtttgttctggaggtcgtaaatgcagtatgcctgaggtgattggcaatgactgggagggcattagcgatgaatacagcgacaatatgtacatctacgttaactcggcaagcgacgttatcgcaaagggcttcgaactggagatggattatgatgcaggttttgcttttggccgactctctttcagccagcagcaaacagaccagccaacctccatcgccagcacctactttggcgcaggggatatgaccgaactgcccagaaaatacatgacgctggatactggtgttcgcttcttcgataacgcgttgaccctgggcactatcataaaatacacaggcaaggctcgtcgcctgtcgcctgattttgagcaggacgaacataccggcgcaataatcaaacaggatttgccgcagatcccaacgattatcgatctctatggtacttacgagtacaaccgcaacctaacactgaaactttcggtacaaaacctgatgaacagagattattcggaggcgctgaataagctcaacatgatgccaggtcttggtgacgagacccacccagccaattccgcgcgtggcagaacatggatatttggcggggacattcgtttctgatgacaatttccgctaggttcagacaatacgttttctctcttatgtcaattttattgcaggaacgaaaaatgaatattttcactttatccaaagcaccgctatacctgttaatttcactatttttacccacgatggccatggctatcgatccacctgaacgcgaactttcgcgatttgccctgaaaacgaattaccttcagtcccctgatgaaggcgtctatgaactggcgtttgataatgccagtaaaaaggtgtttgcagcagtcaccgatcgtgtaaatcgtgaagccaataaaggctatctgtattcgtttaattcagattcgctgaaagtcgaaaataaatacacgatgccataccgggcattttcgctggcgataaatcaggataaacatcagctctatatcggacacacccagtcagcgtccctgcgtatcagtatgtttgacaccccaaccggcaaactggtaagaaccagcgacaggttaagttttaaagcggcaaacgctgcagattcgcgttttgagcattttcgccatatggtttacagccaggattccgataccctgtttgtgagttatagcaatatgctgaaaacggccgagggcatgaagcctctgcataagctgttaatgctcgacgggacgacgcttgccttaaaaggcgaggttaaggatgcttacaaaggtacagcgtatggtctgacgatggatgaaaaaacacagaaaatctacgttggcggaagagattacatcaacgaaattgatgcgaaaaatcagacgctgctgcgtaccatcccgttgaaagatccgagaccacaaatcacaagtgtgcagaatctggcggtggactccgcttctgaccgtgcctttgtggtggtattcgaccatgacgatcgttccggtacaaaagatggactctatatttttgacttacgcgacggtaaacagcttggctatgtgcacacaggagccggagctaacgcggtgaaatacaatccgaaatataacgaactgtatgtcaccaacttcactagcggcaccatcagcgtagtggatgccaccaaatacagcatcacccgtgaatttaacatgccggtctacccaaaccagatggtgttgtcggacgatatggataccctttacattggcatcaaagaaggctttaaccgcgattgggatcctgatgtgtttgtggaaggagctaaagaacgtattctgagcattgatttgaaaaagtcgtgatcggggggaaaaaacatgggataaaaactccgttattccactaaactggccggactaggaaaagcaaacatctctgtcctgccggtacgcctgttacgccgctccatgaggctgaggaatctccagaaaacgagacaggcacagcattgtacgatcaactgatttgtgccaataattaaatgaaatcacagctatgcctgttcatggggttctaggccggaaccccagatttttccgattgtttgttttctaactgattattcagtagttttagagggctgacgctcagtggaacgaaaactcacgttaagaggttttgactatgataaaagtcaaagtaggggtgagtttggatatggaaattattgtactataaggagagcatgaaaacccctggggcagtcactgaatgagggaccagcagcggtaaaataaccagcataatttctgcatggtcgatttttataccgtgacaggctgttttttatacttggggtcagtttggatatcgaaaattattgtacgttaaggttgttttttgaccttgtcgatcttaactgatctcaaacgacgaaacttacctgaagtcggtatccggctgtttttccagatataatcgcctgtcagattgatatgttcccaacctaatggtgataaatgcgataatagttgagcatttattttcatgcccttacgcttcagagcatcaaccgctctttccatgtaaactgtgttccataaggaaatagccgccgtcaataaagtcaatccactggcgcgataactttgattttccggtttccgatctctaatctcccccaatcgatgcatgaatacagcacgggccagagcattacgggcttctcctttgttcagcccggcctggacacgtcgccgcaatgccggatcccgaaaccagtccagcataaacagtgttcgttctatacggccaatctctctcagagctttagccaacccattttgtttgtaagcgtgcagcaagaaccgtattgacgggaatgtgttattcagtcggcagtgctacgcgccaggggagcagttcgccgacccggtttatcggccagtcggctatgacgtcaaggacatagcggaggtagctttctggctccactccgttcagtttgcacgtcccgatcaggctgtacagcagcgctccccgctctcctccatgatccgaaccgaagaacaggtagtttttgcggcccagactgaccatccgcaacgcattttcagcgatgttattgtccgcctcagcccagccatcatctgcatagtacgtcagcgccggccactggttcagggcgtatgcgaacgctttcgccagttctgagtgtcgcgacagggttttcatcttttcacgcagccagctttccagggatttcagcagcggtttcgttttcaactgacgttcggcaaggcgctgttccgccgtcattccccttatctctgcctcgatggcgtacagttcgccgatccgtttcagcgcttcctccgtcagggctgacggggtgcgaacgtgcacatcgtggattttacggcgggcgtgagcccaacaggcggcttccgttatccggccatcccggtacagctcgttgaacccggcgtatgcatccgcctgcagtacaccactgaaccccgcaagatgggtctgcggatggatgccttttctgtccgggctgtaagcgaaccacaccgccggcgccagcgttgacccggcgttacggtcgtcacgaacatacgcccacaaccgcccggtcttcgttttcttattgcctggcaacagcaccgggacaggcgtgtcatcaacatggagcttaccgtcagtcagcacatagccatgaagcgcctcttccatcggagacagcagccggcagcatgcatccacccagcccgacagcagtgaacggctcagctccacaccttgccggccgtatatttctgactggcgatacagcggggtgtgctctgcatacttcgaggtcagcacgcgggccagcagccccggtccggcgataccccgctcgatgggccgcgaaggtgcaggtgcctgcacgatggcatcgcactgagtacaggcatgtttttcccgtaccgtccggataacccggaaggcgctacgcatcaactccagctgttcggcggtatcctcgcccagatagctcagtgaaccgccgcagttcgggcagcacggcgccgcaggcaacagtcgcttttcgtcacggggtagtgattcagggaacggcttacgggtgcgggtctgacgcaacggacgctgtactgccgggtcatacaccctaccagtcagcgtatcgctctctttctgaagccggttcagatcggcttccatttgtgcgatacggcgggagactttttcggaacgactgccgaagttcatccggcggagtttatccagctgcgcctgcagatggtctatttcgcgctcccgtgcaaaatggcatctgaatcgatcgcagtttggcattcgaatcgatcatgatttggcatccatctccgatcacagtttggcatcacaatcgatcacgatttggcatacttccgatcattgattggaattcgccagtcactccgggaattaactcttttcaccacagtctccattgccgtgtttaaaccagtggagacgtcaatgtccaaaaagagaaaatccaggagcactatggaaacttgttttaagatccttcagctcaagttcgataagaagctgactaaccgttgtatcggactgacgttacacatcagcgcctcaaccgtttttgaggttcttgcccgcttcaaagcctcttctctgtcatggccattacctgcggatatatcccatgacacgctggagaaactcattttcccgcccaaagacacctctgcgtcagagcttgttatgcctgacatgctgtacttcgatacggaaatgagaaaacctggcgtgacgcgccaactgttgtggatggaatacaaggcacaggcgggtgacaaagcgatgggatactcacacttctgccgttgctaccggaagtggaaaaaaacgcgacgcctctccatgcgacaggagcatcgtgctggcgaaaagctctttatcgacttctgtggtcctacggtccctgttattaatccggacaccggagagatacgccgcgtggcaatcttcgtggctgtaatgggggcgtccaactatacctatgttgaagcgtgcgaaggtcaggacatgatgtcatggttaaatgcccacagccgttgcctgaccttcctgggcggcgtaccgaagctgctcatccccgataacctcagaagcgcagtgaaaaaagccgatcgctatgagcctgtcatcaacgacagttatcaggcgctggctgagcactatggcacggttattatcccggcccgcccgcgcaaacctaaagataaaccaaaagcagaaaacggcgtcctcatcgtcgagcgatggcttcttgcccgcatccgtaatgaaaccttccacacgctcagggcgctgaatgcacgccttcgggagttgctgacggacatgaataaccgaccaatgaagggatacggtaatcaaacccgcgcagaacgcttccgcatgctggatgcaccagcactctctccgctgcctctggagccttatgaatacacggaatacaaagccgtgaaggttggccctgactaccacgttgaatatgcccgtcactggtactccgttccacacgaactggtcggtcagcgtctgtcactgaaggtggggcagtcggtggtacagctctggcacaaggggcagtgtgtggcgcaacatccgcgcagcacacatgaatataaacacacaaccaatccgcttcacatgccagaacgccaccggcggcatgggacatggacaccggaacgccttatcgagcagggaaaccgtacaggtccgtccacaggccgggtggttgaatccatgctgaaagccaaaccccatccggagctggcttaccgtgcagtcctgggtctgctggcacttcagaaaaaatacggcccggaacggctggaaaaggcctgttacgttgccctgcactataacgccccggacagacgctttatcgacaatctgctgcgtcatcatcgggataacgttgagcttccgttatcccgccagggcgaacaacatccggcatatgcttcagagcatgaaaacctgcgtggtcctggctactaccactgacagaaggaacaaccgtatgagtgataatctgttaaacaaactgacccaactgaaactcccggcgatggccgggagcctgatacggcaacgggaaacgcctcagacttacgacgaactgtcgttcgaggaaaggctgacactgctggttgatgacgagcttctgagcagagaaaacagtcgtgtggcacggttgagaaaaaatgcctgcctgaaatatcaggcaacaccggaagggctgcgttatccggcctcaagaggtctgcgggctgaacagatgagggaactgctgaacggccactacataatccacaggaaaaacctactgataaccggtccgacaggatgcggtaagagctggatagccaatgcgctgggcgaacaggcatgtcgacagaaatacagcgtccggtactgtagaaccgggcgattactggaacagttggctcagggacgtgttgatggcagttggctgaaatatctgaaacagttgcaaaaaatacaggttctaatcctggacgatctggggctggaacagttaagtaacgcccagtgtaatgaccttctggagatcacagaggatcgttacggacaaagcagcacgatagtggtaagccagttcccggtagataaatggcatggtctgatggagaacccaacaacagcagatgccatcctggacagactggtacataactcacacagagtggtccttcagggagagtccctgaggaaaaatcccccgacagtggaaagcagcgaaaaaacgagttaaaaagcggtagaaaaagttaagttcccggttgatcgaatggatgcgaatcgctgatcgaacttcgatgccaatccgtgatcgaatagagcggaatacgcactcccggttgctaagcttttcctgcagggcgtggatcagcgcttcctgttcggccaggcgctgtttcagcaggaagatgtcgtcagaagagatgtcgttcataagcccgtattttaccgggcttattctgtgacaaccaggataaagagatttacagcatggtcagggaggtcagcagccgcttaggctgtcgccagtcgataccttccagcagcatcgccagctgcgcctgtgtaaggaacactttgccatcacgggctgacggccaggcgaagcgcccacgctccagccgtttggtcaggaggcacagtccgtcactggtggaccacagcagtttaacctgactgccgctgcggccccggaaaatgaaaacatggccggacatgggatcgtctttcagcgccgtctgtactttcgcagccaggccgttgaagccatttctcatatcggtgataccggcaaccagccaaattttgatcccggaaggtaacgggatcatcgcttcagttcctgtatcagcagagtcaggagcttttcgctgacattgccattgaagcggagcgtcccgtgccggaacgttacctcactgctgatactgagggttttcgggtcctctgcgagcgattctggctgttcggcagctgcatcgagagtcacaggaagtagctgggggctctctgaagaaggtaatagcagctttccctcgcgccattgttgtcgccatttgaacaacagattggcgttaatgccattttcaagagcaagttttgagatggatatcccgggttcacaggaggcagcaacgagctgctgtttaaattcgggaggataattagggcagccttttcgcctgccgggagtcacatttttctgcatatctgacactttggttcccactacttatttggtggacaccactttgtctaattcgtcagattctgaccagacggttcaggctgctggtgatgctgccaacttactgatttagtgtatgatggtgtttttgaggtgctccagtggcttctgtttctatcagctgtccctcctgttcagctactgacggggtggtgcgtaacggcaaaagcactgccggacatcagcgctatctctgctctcactgccgtaaaacatggcaactgcagttcacttacaccgcttctcaacccggtacgcaccagaaaatcattgatatggccatgaatggcgttggatgccgggcaactgcacgcattatgggcgttggcctcaacacgattttacgtcacttaaaaaactcaggccgcagtcggtaacctcgcgcatacagccgggcagtgacgtcatcgtctgcgcggaaatggacgaacagtggggctatgtcggggctaaatcgcgccagcgctggctgttttacgcgtatgacagtctccggaagacggttgttgcgcacgtattcggtgaacgcactatggcgacgctggggcgtcttatgagcctgctgtcaccctttgacgtggtgatatggatgacggatggctggccgctgtatgaatcccgcctgaagggaaagctgcacgtaatcagcaagcgatatacgcagcgaattgagcggcataacctgaatctgaggcagcacctggcacggctgggacggaagtcgctgtcgttctcaaaatcggtggagctgcatgacaaagtcatcgggcattatctgaacataaaacactatcaataagttggagtcattacccaggctgctgatatgactttccgtgtcaaaccggaatctctaattttgacgattttctttttaggtttaattccctgagggcgacgtagcagtaaatccgacggtgaatcacgctgatattcgcgggttggataccgcattacagaggtccgtcatatgagcctgccactttcttacgtcgcgaatcagctttgttccgccgtcgccaagcgctaacgtgggttactcttgtaccgggctacgtcgccttcagggaactggttattctcattttttatttgtgacattgtggttgttgtgcgacagacattgctattcggcccatatcccagataaaacccgccagctcacgtgcaacagcaacaattgtaatattgacattctttcctttggcctgaagttttcgatacctcttacaaagcctgagttgagcatcccatgctctgtcaatgacggggcggggtaaattttcctgccttttttgtattgccggactgatgcgtgccggatgacggtaactccacgctgcctcgaccaatagctttctggcatagctgtttccggctttggtaatgctgccctgatgtctgcttccacccgatgaatattctgatggcgtgataccaaaccatgacatcagttgtcgtggatgttcaaaacgggtcagatcacccagttcagaaattaatccaaccgcagtaataaactgaatccctcgcatggcttgcagcgcctctactaccggatacagcctccattcggtaacggcctccttcagggcggattccagccgttcacattgtgcctgccggtcttctattgtacgacggtgttcgtcaaaagctaattgtcgccagggactttcgaatgagtatttgctgagccagcgtcggtgtgcagggccccaatctgctcgcccgacataatggaccccatgaaccagaagaaacgatttcagacgttgccttgcatgccgtaaatcatcgcgggcagatgcccatgcccgggccaaatcccggaatgcctcatcttcaatgccgggtacgtagacagcagaaagatctcctgcacgcagtgaacgcacaagtctgatggcatcacggcgatcggttttaacccgctcccccggttttttcgggataagtgagggggcgcagaccatgcagtcaaaaccggatttcaccagccgacgataaagtccataaccacagggccccgcttcataaacgatactgacctgcgatgactttgacctgagacgtttacaaagattctgaatatcagtaggtgatgtgccaattttacccatcagttcaacaggttctgaattgatagcataagcgacagtaatcgattctttgtgaacatctaacccgacgtacaatgtgttattgttgttcatgctggcctccgtggtggaaataccggggtgtagcaacagctcacccatgcggctctgacaacgatgtgaggtagcctgagtttaacggacactccttcctgaaatagaatggcatcagaaggagctaataatgagcagaaaaacccaacgttactctaaagagttcaaagccgaagctgtcagaacggttcttgaaaatcaactttcgatcagtgaaggcgcttcccgattatctcttcctgaaggcactttaggacaatgggttaccgccgccagaaaagggctcggtactcctggttcccgcacggtggctgaactggaatctgaaattctgcaactacgtaaggcgttaaatgaagctcgccttgagcgagatatattaaaaaaagcaacagcgtattttgcacaggagtcgctgaaaaatacgcgttaatcgaacaatggcgacaacaatttcccattgaagcgatgtgtcaggtatttggtgtatccaggagcggttattacaactgggtacagcatgaaccctcagacagaaaacaaagtgatgagcggctaaaactggagattaaggtggcacatatccgcactcgcgaaacatatggaacccggcggctccagacggagctggcagagaatggcatcatcgttggtcgtgaccgactggcacgtcttcgtaaggagctaaggctacgctgtaagcagaaacgcaagttcagagcgactacgaactcgaaccacaatctgccagttgcgccaaatctgctgaaccagacgttcgctcctacagcaccaaatcaggtctgggtggcggacctgacgtatgttgccacacaggagggatggttgtacctcgctggcatcaaagatgtttatacgtgcgaaattgtcggctacgccatgggagagcgcatgacaaaagagctgacaggtaaagccctgtttatggcgctcaggagccagcgcccacctgccgggctaatccaccactctgatcgaggttcacagtactgcgcatacgattaccgggtcatacaggagcagtttggtctgaaaacatcaatgtcgcgtaaaggtaactgttacgacaacgctccgatggaaagcttctggggaacgctgaaaaatgagagcctgagccactatcgttttaataaccgggatgaagccatctcagtaatacgggaatacattgagattttctacaatcgtcagcgtcgtcactctcgtctggggaatatctccccggcagccttcagggaaaaatatcatcagatggctgcttaaaaaaagaacaaatggtagtgtccgctattgccagtacacctcaatgttaacccgcgttaaatatcccacgttggccagcatctgtctcacggaaagtcatactgccttactatttcctcatgttattctccatatcagataaatagcatctgtatttcaggcatcctgaatattgcagcacacactgaataacaccttattttgtgaaattaatcacaaaatataaaatcacgacttaatacggaaaaaactctgtgctactcagaactgtccggtcatactgcccgaccggatattaaaaaaagcaaatctcataaactcctttcagccttctgactcctggagtaatgaaggctgcttttttcgttacacccttccccggcagcgccggtggcagtgttcagccctttttcgggcaaactgctgccagtctgtcctgggcgcaacacaggcagcccgtcgccatgcttctgccgcttccatccagcgtccactgacttccagaataacggcccgcccgccggcacgctggtaacgccagacctggccgttccgtgaactgtttctgaatccattcattttcttgtccccctttagttgtcagtattattgtgataaataattcagtggactggcttcctttcggaagcggaagttatttccttttaagccttatttccctgcctcctctctgatggaggcttttttttatttctcatcaagcacggcctgaagttctgcctttatccggttctggcggcggattttatccagacgcgctgccgcatacgcttcctcctcctgagaaatatgctccgtcacatacccttccgtgtcataccggcaggcaccggctttcatggcacacagatagctttctgaacgggtgatggccttcagcgccctgcgcagttttttatgcgagagcgggatattccgctgcgccacgtcttccagtaacacgtcccggataccgcaggccagaagccggggggtgtcaccgtcaaataatcccggccaccagggtttcagggtattcacggcctcatccagcgtgggcaggttcagataaatggacagtgcctgtctggcctgcgctttttttgccgccagctctgcttcccgggctgctttctcggccagcttctgctttttcaccttccactttggtggcgtggtgacattgatgatggttttccggctgcggacaggcgtctccccttccgttttccgcttcagtgtcagtaccggtcgcttctgctctgtcatgctgtgttctgcctctgacgaatcatcctgttacggtcaaagataccacacccgtcacagcgccagaacgcccagcacagccagatgacaggcgtagaataccgggaaaaaatccccgggccagaaacggggtaatgattttcctgcacacgacaccagaccaacggtcagcaccgtcatcacaagaccggccaccgccgctgcatcactggtggcaaggttaagcgccggaataacagccagcaggcaggcgaccagcgccagacgttccgctctgtcttccgcccggtacagtcggtggctgactgccagcatcagcagcccggcaatgccgtaactggtgccggacaaaggcccccaacagggccatcagaagaatggccgctgctgtacgccacccactgcgcgtttcacaccacgtcagcacctgtgccgccactgcaaaggcaaacaggatattcccctcataccagggaaagcctgccagataatatgcgaactgggcaataattccccatccccacagccggttaatggccggttgccggatatgcgcatgacgggacagattcagcccccacaccagggcaaaaagcggaaaggctcctcgcccggccagaaacatccattcctgcttcagctggaatatcagattgatgtggtccagtaccatcagcaccagtgccaccgttttgatgatatcccgctgtccgggtgaccagaccagaaatgactgcaaccaggtatcggtccgtgcagccagtgaatcgttacgtgtcgtgttcgtgttatccgttgtcatcagtgtttgtcttcctgtatcagtctccgcccggggttttctctttctgcaggtcacgaaccatatcccgctccatctgctgcagacgctcctgcagcagattttcccgggcaacctcccggaccgcttcccgctcccgttgtgattcacgcagcacactctccggcagcgcggcttcccgttcagttatggcagcccggtcacgctcctgcccggcaatttccctgacagccagctctgttttgccgtccggcaggtcaggtttgttctctgccattttacggacaatttcatctgcgcgacgttccgtttcacggcggatggcctcttcagcctgccgctgtgccagtacctctgccgtgaccggttcgccatttccggctcccggctggacgctgttgtccgggatatccccccacacgcggccatcggtgatggcaccgggattccacggacggccttcaccggcaatgcttaccaccacaccactgtcaggattatcacgggcaatccggacgccatcctgcatattatcagccagcaggctttctccgttacggctgccctgcagggccacgaactgcgcatccccgctgccttttacccgaccttcaccgctgaatccccgcagcccgtttccgtcatccgtggtcagcgggttcagccagataccggcggacttgccgttacggtcaaacgccggcagtgccacatacggttgcggatatttacgtcccggagcaataaaccgtgcaggactgtctcccccggccagccccgcctgacggagaacggcacggcctgccgccacgtcccgcagctcccgcgccgtactgaacagccgctctgcattcatgacctcccggtccggtttcggctcaaacacatcgtgggcagttcctttctgtacggcattgttgatggcatccgtccagccctgacggttatcggtgtacacctgcacatgctgcttcatacgcgacaaggccacgtaggctgactcaaagccggccacccgcccttcgttatcccggatatccgcagccagtctgacggacgggtcaaacaaccggctgctgtatttctccgtgcgtccgataccgggcacggcagggggccgcagactgttgcggatcacccgctccttaaaggcatccattttccggcccatctcaccggactgctccagtgccgtcaggcgctgcatgatcaccgtcagcatgtccggctcctttaccggccacagatcaccccaggtgccaagatcggcggcggccacactctgcccccatatcagcagggcaatcagcccccggcatctcatggttccgctctcattcgccgggcaatatcctgctggatttcccgggtgatatccggagccccctgtaccacggcaggcgacaccagaatgaccgcgtggtgtttctgctgccacgcctgcaggctggcttccagtgccgtgttaaaacgcgctgaaagggcttttgactgtgcttctgacagttgtttctgactggcgctgtcaaaaaatgcatccacagtctgtttcatgttgaaggcggcagtcatcggtgcgttcagtctgacaatgccgtaactgacggctgcgttcagtaacaccattgccaggcatcccggcaccgtccaccaccagtggctgcgtcggggggctgtaacatcagtcgttttttgcgttgtggtcatgcaacactcctgtatttctcatgttcttccagccaggcttccagcgaagccatctccggccctgacttcttccacgccagctgccacaccgcctcatgaatactcagcccctctttacgtttctgctgcacaaactcaaaatccgggccgtcagagctgtacatggcgcggcttaacgggtccacaaacaggcggtgccaggaggaatggttttccacctgcagcaggaaggaactgaaccactggtctttggccgcaccaaacttaccaatcatgtcgcgctgcagtggctggaactggtccggatacagctggttgtattttgcgaactccttcgcactctgtttgaggataattttgtaggaggagttaccccatgccgcacgggccgcactggaggccttgtcagagtcaaagtcgacgatgttctgtgtgatggtgatataagcaccggtatgacgacgggcggtacggtaacctttctcaataaactcaccgaccttgtgatttttgaagtccagcagacgccagccttcatcaatgacgttcagtttcttgaggttacgcggcgtgcggtacatcctgttctcgatgtagataatcagggagaacatcaccgcaaccagcagtgacggacggtcttccagtccgcccagctccagcaccaccatttttgcgtcatcccgcagggacggctcatcagagttaaaatactggccgtaagtgccgttggcagtgtactggtcaagcagcacaatcatttcgtccagacggctgcggatagtcggtgacccggcatactgctcgctgtcactggcgtttttcaggaaatccaccacgtcatcaatacgtgccctgttctctttggccagccaggaggccctgaccgcctgcagcagcagaccttcatgcacttcatccaggttaccgttggggctggccatcactgacaactggtcacggacacgctccgctgactggtcgatatcggtgatgttcgcaaacgggttaaaacgcagggtttcaccgtccagatatacgccccccatgttctcacacagggacttgtagccatcccccatgtcgaacaccacggcaaagcccccggagtccagcacgctgcggataagtggctgtatcagcccggttttaccggccccggaggtgccacagaccgccatgttgtagttggtgttattcattccccggaagaaaatatcgataaacgccagctggttacggtaggtgtgacacggcaaagggcacattaaatcccattggggtcacggcagtgcgttgctcattctgaagacggtagttattcaccccctgaatgaggttaacagagaggctgagaacaataagcactgacataaatataaaggcgatggccattacacgactggtacttaaacgggcaccgtgttccatataacaatcctggtatcagttctatttaatccactgccggaaacacgaatcgggaacattatgaaaaataccgcgcagcagggctgttggcatataccagtaaatcaggtcacgtaaccaggaactgccccgcccttttttcagttttttaatcccgaaataaaccagaaccgctgcaccaataccgaacagatatttcgatgttgtgataccccagccaacacagattgctgcggggatcagttcatccagtggcaggccaaaccagcggctctggttggtcagtgtttccgggaaacgatatttcttaagtttattctcgtctcccaacatcgttttatttcctgtcagaatccggcaacagacatacctactgcaataaatacagagagtatggcaaagccgaccaggaacttgacgtttttggtcatcatgtacatgactgcaccgaccagaacttcagccagaacaacccatttaacgatactggagtccttaccgaaggtcgccttaaccgtttcctgacctttagccatcaggtccgtgcctttaccagcagccatagctaactcagggaacaacatcatcagaacagcaaccgggatcactgcacgaaccaggcgaagcatattcagacgagtgaatttagaaaaaaacgatttctttttgacgggcgcagaagtaccctgaacacttaacgctgaaccgccccgggtttcctggagagtgttttatctgtgaactcaggctgccagatcatcgtttccgatggaagcataataagctttttctgcttctgccggaggagtatggcccagcctttccagcaatcgtcgattgttataccagtccacccacgtgagtgtggccagttccacttctgcacggtttttccagctcttacggtgtattacctccgctttgtaaagaccattgatgctctccgccatcgcgttgtcatacgagtcgcctgtacttcctgttgatgccagtaatccggcttccttaagccgctgtgtgtaggccagcgatacatactgagaacctttatcactgtgatggaccgtgccggacggtcgacgggcccataacgcctgctccagtgcatccagcacgaatgtcgtctccatggacgatgagacccgccaccccacaatgtatccggcaaacacatcaatgatgaacgccacatagacgaagccctgccatgtgctgacgtaagtaaaatcagccacccacagctggtcaggtcgttctgccacgaactgacggtttacgcggtcgcctgcggcaacggctttccggctgatggtcgtacggacctttttaccccggagaacaccggcaagtcccataaccgccatgagacgtgccacagtgcatctggccactctgataccttcccgtaacaactgacgccagactttacaccgtataccttgtgattttcatcgtatacgcgctgtatctctttcttcagccagtcatcgcgctgcgcacgggcactgcgtttatccggatgatgtcgctgttgctgacagtggtaatacgttgacggggcaatatgcagttcgctgcatagcggtccgaccccgtactgctcacgcagcttatccagcagtagcatcattttttccagaggcggtcaaactccgccttcgcaaaataagcggaagcctggcgaaggatatcgttactgcggcgcagttcacgattttcacgctccagctctttcagacgctgacgttcagcggtggtgagcccaccatcaccgcccccggtatcccgctcatgctggcgaacccagacacgcagagtctccggcgtacagccaatctttggggcaatggaacaaattgccgcccactgtgagtcatattcatcctgactttccagaaccatacgaatcgcccgctgacggacttcgggggaaaaacgagtatttttagtcatcctgtttacctctttctcagggagtttagtctccaggatttccggggcggttcagacatctagaatttactgtcagcaccggcgttaaagtttacttctgcgatcctcagagtccttggcagcggggaacaaatgagaatacaaatgggctaattcggcagtactttcctaaaaagacatgtcttgcccaatatactcaacatcgagtaggcagcctgacggctgcggcttgtcatggtctgcaattaccgttataaaaacaggcaatgtcattgtctttcaggtggttatatggcccgttcagctaaaccccgtaaacgttgtcaacgccacgatgtttgaccgttatttgccattttcatgcccgctaaatactttcgttactgatgctgtccgctttccaccatttcatcatcactgattggcgttgtgtttttggtcagcactccagctttacgtttctcttttaaccggtaactctctcctttgatattcagcgtggttgagtgatgtagcagccgatccaggatcgctgttgccagtacgtgatctccgaacatttctccccagtctgcgaaccctttgtttgacgtcagtatgatgctcgctttttcatatcgacggttcagtagccggaagaacagactggcttcctctctgttcatcggcagatagcctatttcatccaggatcaacacccgggcataactcagttgctgtagctgacgctccagccggttttcctgtttcgctttcatcagtgtcgcgatcagtctgtccagtggcataaacagtacccgatgtcccgcatccaccgctttcacgccaagagctatggccagatgagtttttccgacaccaggagggcccagcaggatcacgttttcgctgcgctccacgaacgccagaccagccagttcccggacaaccttacggtcgatgcccggctggaaggtaaagtcgaactgctccagcgttttgacccacggcagacgagcctgcttcagcctggactccataccgcgctgatgcctgccgttccattcctgctgtagcgccatgcacaggaactcccggtagttcagctcttttttagctgcctgttccagcaggctttcaacgtgataactcagatgctccattttcaggcgactcagcaggacttccagttcatgcatcacaacagctcctcataggcactcagtggtcgatgttccacctgactgacctgctgccagagcggggcgtgatgctccggcactgtctgccagccagacgatgctgaacagaggcgatgtgaggccaccagtttctcattactgtagatccgcaactcgtcatccagcgatattcgtatcgataccggctgaccacacagcgcttcgggaacgctgtaacgattaccaccaacctcgatatagctgtcccaggacacatggcggatatcgaagtaactggtatcgaagtctgtatccggtaacggctgcagatgttcctgctccagcgcgaagcgctgttccggcgtttctttgaactggcgaagctcccgtttgtcagccacatcggctatccattgctccagttgttgattgacatgagtgaagctgtcgaacctgcggtaccggacgaagaagttctccttgaggtatttcaccatccgctcaaccttaccttttgttctggccctgcgtggacggcatgcccgtggcaggaagttatagtggtcagccagcaacaggaatccggagttgaacacgactttcccgttgttattcttcagcaccgcagccttctggttatcaaccagcaccgttttcacacaaccaccgaagtagcggaaggcgcgaaccagtgattcgtaggtatgctcagcatcctgttttggtgcggcgaagacatggaagctgcgggagaaccccagcgtattaaccgcaaagttaactttgcaccgttgcccggcaacctccacctcaacttcgccccagtcatgctggagctggtatccaggctgagtttcgaagcgaactgttctttttgacggacgcattttacgtttgggctggatgtagtaacgcagcatggaacgtccgcccgtataacccattgccttaatctccgcgaagataacctcgctattccagacattctctgccaggcgcatgtcgatgtaatccataaacggtttcagcttaaccattttgtggcgagtctttctggctggcggttcagggtatttgaggtagcgtctgaccgtccgttcagagcaaccaatctgagtcgcaatatcgacgatgtacgcgccctgctggcgcatttgctttatcatgtaaaagtcctctctgctcagcatgttgatgtcctttctggtgtgagaaccttaaggaaacaacatgttgggtggagcggacaatccaaatggcgaattaccgtcttatatcactggcgctgacaacgtaaacccgcctctcaaagaagcaaacttccccgctatgtcgtgaagcttcacgaagatgatttttttgacgaagaagacgcagaagttctgcgctttgatagttttgacgatgccgttgaatgctgcgcagacctgaatattccgttctttgtggatgcgggaaacaaaaagctggtcttctggtttgtacgtgttgatgacgaagggtatccggaaatcgcccgctgcacggagcgggaatttgcgaccattctttccggtatcagcgccggcggtatgtactgcccggagtgtggcacggttcactggccggacggagtcgccccgcccttctgatgcttccccgttttgccgatatctttcagcagggaaaccactggcttaactggctggagaagcagccggaaagggcagtacgtccggtggtgattgagtcggtgaccaaaatcatggcgtgcgggaccacactgatggggtatacacagtggtgctgttcatcaccggactgttgccatacaaaaaaggtctgcttccggtgtaaaagccgctcctgcccgcactgcggggtgaaggctggcgcacagtggatacagtatctgctgagcctggtccccgactgcccgtggcagcatattgtgttcacacttccctgccagtactggtccctggtgttccacaaccggtggttactgacagagatgagccgcattgcagcggatgtgatactggaaatctgccatcaggcagatgtggagccggggatattcacggtgatccacacatgggggcgtgaccagcagtggcatccgcatatccatttatcgacaactgccggtggtgtgacgtcgggccacacctggaaaaatcttcatttttacgcccgtaaggtgatgagcatgtggcgctaccggataacacggttgctgtcacggaaataccctgacctggtgatgccggatgcgctggcagcagaaggaagcagtaaacgggaatggaatcgcttcctggacacgcattaccgccgtggctggaatgtcaacgtatcccgggtgatggataatgccccccatgtggcggtgtactttggctcttacctgaaaaagccaccggtgccgatgagtcgtctggagcattatgccggtcaggatgaaatcggtctgcgttacaacagtcaccgaacaaaacgggaagaatacctgttgatgagtggagatgagttcatggaaaggttctcctggcatgtggcggataaggggttccgtatggtgaggtactacggttttttgagtccggcgaaacggcggttactggaagaagtggtgtacatcataacggagacagtgagaaaaacggcgatgcaaatcacctggagagggatgtatcagaggttactgaaggttgacccgctgaagtgcgtgctgtgcgggagtcagatgcgttttacggggctgaagcggggctaccgtctggcagagcaggtcctgatgcatgagccgctggcccggatgcggtggtgcggctgagagccgcagagggaaagttgcgtccattttgagggaaacggagcaaaaaaccgccattcataccctgaatcaatcagagccatccagtttaatcgtcggttccgttcatatgagcaaaagtggtgttgaagaaacatccgttttgtggtgtttttttaatctttttggggttttaattcctatcgatcaaggcaataacattgctcttaaggaatttacggcacatcgtattaaatgcaccgtctttccctttaacagtcccatcatgttttattccttttacagccccgtccgggctgtatgttttcaccagcttatccagtgatcgttttgaaaatggctgcattggatcacgtggctgcaaaaatacataatccctgttgcactcaggaactgaatcacgccaggctttctgctcgtcgataatccgccggatctcaggcgttatcggcaggcggaaagccttttgtgttttcatagcccctcgcatgccgataaccccttccggataaacaatttcaccagcctcctcgtaaacgtagtcccagcgcaggttatggacattaatcggacgaacaccagtgatgatcatgaagcgaacagcattcttctggtgtacagaggtgcaggcagcaacattgagccagagtcgggcgattgattcaatatcggtaaaaagccgtgtgggggtaggtttctgtacgcgggaggaaacataatcatctggcagactggcggcaacattgcggccgttgcaaagagtaggtgcgcagaacttccagaaccgacggagctcggcaaacaactccagggcgttattgttcgagcgagtggcgatccactcgtccagcacttccaccagccgattgtatgttacgtcgctgaacacctcacgctcgccgaacgttgctttaatccggtcgatacgcaccccgtaggttgtgaaactgtccgggctcagcttctgccgggctactttggctttgaggtcatcccggtacatttccagcgctgcatgtacggactctgcccgcagtccaccgtcagccatacctagtgctttttcgcgcgccagctggatagcgagctccggccactcgccgagctttttacctttgaggcccatcttttttggaaactcggcgtaaaatgtaaccttaccggctttgctgaaatcgatacggagatagttctctttttcgtatttggaacggcgagccacgccggaagcagcgaggatgattttggcggcagcaacacagattttcatgtgtgcgctggtataggggggtttacaggcgtcccatttttcagatgcggctaaaacatcgtcattattggggctatccggattatgtgttacagtgcgcggcattctcaatccttatctgcgtaggcgcagaaaacaagctcacacatacaagtcttttctacgggacaaaatgcaatgtgttgcggttttgtgttgctggactgagtttatcaaggttaaatacactggatcaacatacagtaagttaatgacagtaaagcatacaaactcgatacaacttactgattttaaaatgatttaacggtaatccattgaaatgtctttactaattactaaacgctgtattaattgtgatatgtgtgaacccgaatgcccgaatgaggcgatttcaatgggagatcatatctacgagattaacagcgataagtgtaccgaatgcgtagggcactacgagacaccaacctgccagaaggtgtgcccgatccccaatactattgtgaaagatccggcgcatgtcgagacagaagaacagttgtgggataaatttgtgctgatgcaccacgcggataaaatttaatattctactctggaagtagagtattaattatattactgggaagccttaacgccattatatttatttaattgatgacattagcataatcattcactaagttaatttatatagtatctgccaagacacttatttatagttattaaaggcgcgtccgattggttcaccggacgcaccttaagtacgtttccttgtgttataagaacagaaggatcagctgtaaaacagcaatgatgattttgatgacccgtttaatcaggtatcggcaatcagtcattcgtttttccttaaacaaggaatgcagccgttcagtattgctttcttcgtaaaggctcgagtttttatgctaaagattgcaagttgcttgtaaaagataagtacactgatccataatcgctgttgttgagggtgcatgctgcacaaaattaaagttaaaaagtaaaacccccgttccttaccagttcgggggttttactttttaaagagaacggtattattttaactttcaataattaccgtggcacaagcatagtggcgttcatctgccagcgttacatgcatatttacaacgccgagcttttccgccagttttaatgcctcaccccatagccgtagccgtggtttgccgagctcatcattgaatacttcaaattgattaaacgccagaccattgcggatcccggtgccaaacgcttttgctgcggcttctttcacagcaaaacgcttcgccagaaaacgcaccggctggtggtgcgttttccagattgcccattcgttatcgcttaatacgcggcgtgccaggcgctcaccggatcgggcgatcactgcttctatgcgagcgatctctacgatatccgtgcctaaacctaatattgccattagccacgcgcttccagcatcagacgcttcatttctgccaccgcatctttcagtccggtcatcactgcacggccaataatggcatgaccgatattcagttcatgcatctcagggatggcggcaatggctttcacgttgtgataggtcagaccgtgtccggcgttaactttcagaccgagactagcggcaaaggtcgcggctttggcgatacgcaccagctcttgcgcctgttcggcgtcagttttggcatcagcatagcaaccggtgtggatctcgataaacggtgcgccaacctctgccgcagctttgatctgctcttcatcggcgtcgataaagagagaaatctgaatcccggcatctgtcagacgtttgcaggcatcgcgcattttttcacgctgccctgcaacgtccaggccgccttcggttgttacttcctgacgcttttccggtaccaggcagcaaaaatgtggcttcgtctcaacggcgatcgccagcatctcttcggtcactgccatctccagattcattcgggtatccagcgtctgccgcaggatgcgcacatcgcggtcagtaatgtggcggcgatcttcacgtaaatgcacggtaatgccgtccgctcccgcctgctcggcaataaacgccgcctgcaccggatccgggtaagcagtaccgcgtgcgttacgcagcgttgcaatatggtcaatgttgacgcctaacagtaattcagccatgacaatcctcatcattcataatgtgttttcaccgttcgcttaggcataaactgccggaacagttccctgctctttaatggtttaccgccaagatacggcttaagcgccatgcgggtaaagcgtttcgcggcgcgtagtgtgtctgcgtcaggaaattcccgcgcgtttaacgcttttaactgccttccggtgaacgttttattgtcgataacgacgcttgcgataaaccctttttcttcgcgataacgatacgtcatggtgtcatctaccggctcgccgctacccgcgcaatgggtaaaattgacgccatagcccagatgcccgagaagtgccagttcaaagcggcgcagcgcgggttctggcgtaccagtggcacctgcaagagactgaatgcagtgcaagtaatcgaaaaagagttcagagaagcgcgtctcgtattccagtacgcgggagagaagttcgttgatgtacagaccgctgtaaagcgtgataccgcttaatggcagcgccagcgagacagcttcagcactgcgcagcgttttgacttcgccacgcccgccgaaacgtagcaagagaggggtgaaaggctgtaatgcacctttcagagtagagcgtttagagcgtgcgcctttggcaaccagacgcacgcgacccgattcctccgtgaagacgtccagcatcaggctggtttcgctccacgggcgactatgcaggacaaatgcgcgctgccagccttccatcggagtgactcttaaagatcgtcaacgtaaccgagactgcgcagtgcgcgttcgtcgtcggcccaaccggatttcacttttacccacagttcaaggtggacaggcgcttcgaacatttcctgcatgtctttacgcgcttcaatcccgatggttttgatcttggcccctttgttgccaataaccatcttcttctgcccttcacgctcaacgagaatcaaaccattgatgtcataaccaccgcgttcgttagagacgaaacgttcgatctccacggtcacggagtacggcagttcagcgccgaggaaacgcatcagtttttcgcggatgatttcagacgccataaaacgctgtgagcgatcggtgatgtaatcttccgggaagtgatgggtcgcttcaggcagatgcttacgcacgattgctgcgatagtgtcgacattcagcccggtttcagcagagatcggcacgatatcgaggaagttcatctgacttgccaggaactgtaagtgcggcagcagatcggctttttcctgcacgttatccactttgttcaccgcgaggatcaccggcgctttgccatcgcgcagtttgttgagcaccatttcgtcgtccggcgtccagcgggtgccttcaacgacaaaaatcaccagctcaacgtcgccaatagagctgctcgccgctttgttcatcaggcggttaatagcgcgtttttcttccatatgcaggccaggggtatcaacgtagatcgcctgatacgcgccttcagtatggatccccacaatgcggtgacgagttgtttgcgctttgcgggaggtgatggagatcttctgccccagcagtttgttcaacaatgtggatttgccaacgttcggacgtccgacgatggcaataaatccgcagtaacttttatcgatgctcattccagctccagttttttcaacgcctgttcggcggcagcctgctcagccttacgacggcttgaacctgtgccaaccaccggttcactcaggccgctgacctggcagtggatagtaaattcctgatcgtgcgcttcgccacgtacctggactaccagataagtcggcagcggcagatggcgaccctgcaaatattcttgcaagcgcgttttcggatctttttgtttatcgcctgggctaatttcgtccaaacgagtttgataccagttgaggattaatttctcgacggtttgaatatcactgtcgaggaatacgccaccaattaatgcttcgacggtatcggcgagaattgactcacgacgaaatccaccgcttttaagttcacctggccctaaacgtaagcactcgcctaactcaaattcgcgcgccagttccgccagcgtattgccacggaccagcgtggcgcgcatccggctcatatcgccttcatccacacgagggaaacggtgataaagcgcattggcgataacgtagctcagaatagagtcgcctaaaaattctaaacgctcgttatgtttgctgctggcactacgatgagttaatgcctgctgcaacagttcctgatgattaaaagtgtagcccagcttccgttgaagccgattaattacgatggggttcatgcgataccaataaataaatgcgtcaacaattcagcacacgaaacagacctgatatacatggctctgctaactgcttcgctgcagtttcagtttaccggtatatggggaccaacgctgtttcgtgtgccgtggcaacctggaggtgccaaccttaaacttcgggggaatattctatacacaacgacgggggatgtcgttagccacgggagatttatctcataaataattcacgttgtcgccataacggcgacaacgtgaacgaagatgggctattaatggatgccgccaatgcgacttaagcgcacacctgtcggccattcgccttcttgcttatcgaaactcatccagatagccgttgcccgaccgaccagattcgcttcaggcacaaagccccagtaacggctgtccgcgctgttgtcgcggttgtcgcccatcatgaagtattgtcccggcggaacaatccaggttgccagttgttgccctggctgctggtaatacatccccacctggtcctgcgcaatcggcactgtcagaattcggtgcgtcacatcacccagtgtctctttacgctcggaaagacgaattccattttctttggtttcgtttttcggcacttcaaagaatccgctggtcgcttccccaccattacggcgtgagaaggtctgaacgaaatcgctcggttccacgtttgagtaggtgaccggcagcgcgttttcacacgcctggccggaactgcatcccggttgaatcgtcagctcttttgagaccggatcgtaagtgactttatcgcccggtaaacccaccgcgcgcttgatgtaatcaagctttggatcttccggatatttaaagaccacgatatcgccgcgtttcggatgaccggtttcgatcagcgttttctggtagataggatctttaatgccataagcaaacttctctaccagaataaaatcaccgattaacagagtcggcatcatcgaacctgacgggatctggaacggttcataaataaacgaacgtacaatcaatacgatagccagcaccggaaaaacagaagctccggtttccagccagccaggcttcggtgcaacctttttcaacgttgctttatccagtgagtcaccggcagccgcctgcgccgctgcctgacgttcccgccgtttaggtgcgaaaaagaatttatccacgcaccataaaatgcccgtcaccagtgtggcaatcaccagaatcagggcaaacatattcgccatgccaactcctaagggttatttgttgtctttgccgacgtgcagaatggcgaggaacgcttcctgcggcagctcgacgttaccgatctgcttcatgcgtttcttaccttctttctgcttctgcagcagctttttcttacggctgatatcgccgccataacatttagccagtacgtttttacgcagctgtttcacggtggatcgcgcaataatgtgcgtaccaatcgctgcctgaatggcgatatcaaactgctggcgtgggatcagatctttcatcttctccaccaactcgcgaccgcggttttgcgaattatcacggtgggtgatcagcgccaacgcatcaacacgttcaccgttgattaatacgtctacacgtaccatgtcggacgcctggaagcgtttgaagttgtaatccagagacgcataaccacgcgaggtagatttcaggcgatcgaagaagtcgagcaccacttccgccatcgggatctcgtacgtcagcgccacctgattaccgtggtaaaccatattggtctgcacgccgcgtttttctacgcacagcgtaataacgttgccgagatatgcctgcggcagcagcatgtgacactctgcaatcggctcgcgcagttcgtaaatgttatttaccgcaggcagcttggatgggctgtcgacgtagataacttcccttgacgtggtttcaacttcatacactacggtcggcgcagtggtgatcagatccagatcgtattcacgttccagacgttcctggatgatctccatgtgcagcaggccaaggaagccgcagcggaaaccaaagcccagcgcgctggagctttccggctcatagaacagtgaggcatcattcaggctgagtttacccagcgcgtcacggaaggcttcatagtcgtcggaacttaccgggaacagaccggcgtatacctgcggtttgactttcttaaagccaggcagcgccttttctgccggattacgcgccagcgttaaggtatcgccgactggagcgccgtggatatctttaatcgcacataccagccagcctacttcgccacatttcagttcagtgcggtcaacctgtttcggcgtgaagatgcccagacggtcggcgttataggtctgcccggtactcatgactttcactttgtcgcccttacgcagggtgccgtttttaatacggataagtgaaacaacgcccaggtagttgtcgaaccatgagtcgataattagtgcctgcaacgggccttccggatcgccttccggcggcggaatgtcgcgcaccagacgttcgagaacgtcctgcacgccaacgccggttttcgctgaacagcgcaccgcgtcagtggcgtcgatgccgacgatatcttcaatttcttccgccacgcgttcaggatcggctgccggcaggtcaatcttgttcagtactggcaccacttcgagatccatttccatggcggtgtagcagtttgccagggtttgcgcttccacgccctgcccggcgtcgaccaccagcaatgcaccttcacaggcagccagcgaacgggaaacttcataggagaagtctacgtggcccggggtgtcgataaagttaagctgataggtttcgccgtcagacgctttgtagtccagcgtcacgctttgcgctttgatggtaatgccacgctcacgctcaagatccatggaatcgagaacctgcgcctccatttcacggtcagacaggccaccgcagatctggataatacggtcagacagcgtcgatttaccgtggtcaatgtgagctatgatcgaaaagttacgtatattcttcataaagtatgattattgtgccttaatgcccggttaaccaggcttttagaagtcgctgttctgagcttaacgtctgtattaatagaaacgccgcattctacactacaacattgaggcgaggaaatgttcataccgtatggattgtggtatctggaaacgtcctcgcatttgttatgcaaaatgcaacaaagccagtgaaatcactggctcgcgtcttccgaagatgtttcaaatcgcacaaggtcaggcggcaatgccacgcttaatatgatcggttgccattctgcccgggcagcaaacttacgcgagtaaccgcgcgcaatcagaaacccgccaataccgccaaggatcgcaccacataatgctgcaacgtcagaagcaaagagtagctgaaatagcgaagcgataaggaataatcccaccagcggcgacatataaaccagtaatgcggagctaagcaggctgccttcggcgatccccaattccactttttgccccggcactaacggttcatcacagggtacgacaatggtatgcgtggtttgcgggccaagtttattcaacacgcggctaccgcaaccggcgcgtgaagcgcagctgctgcatgaggctttaacatcacaactgaccagcgcctgcccgttttgccaggagacgacggtagcccactctttgatcattgcgctgccccgaacttaatattctcggcaatgcgtttcgccgtttgcggcggcagttcaccgacaatggtgatttcggcgttatcacgtacgcttgtactgacggttctgcgtccggtgcgcaacatctgatcggtgctcgatggcgtagcgcggttaacgtttaccgagaagctgaataatccgtcggaatagagacgtgattcgataggcatgttgtccatcgtcggtagcggacgtcgactactggaaacttcgctaaaaccctgtggcaaccaggttggcgtccagctgaatttagctttttcacctacaggaacagaaagcaacggcggcaaatttgccttcgccagcgtctgcatactgctgctgatatcctgattgacgttaaaagaaatcacgcgaaattgttccagcgtttcaccatcgcgatcaaggagatcaaccctcatcggtaatttcgattcagtgtccatccacacgatgtagctgtagcgtgtaccatctcgggcaaccacgcgaatgacttcgcaaagacgatcagcaatacgcgtgcgcccgacggagataaagtcgtagtaaggagaaaggcgtttgaaatcggtatagataagcgatggcagagaatcaacaatgtaatcgccattaagcgtgaacggttcaagtcccggttcaaaatagctgatttcattgccgcgctgtaccacttcccggcgcgggccatccatttgcaacaattgtgcaagaggacggttatcgaggcgtgcatgtcgataacgcagagactcaacaccctgtttattgatgctgatgaatgacagctcgtaattcagtgactgactggccaggttcatctgctgtaataacgccccggacgcgggagtggccgaggcgttagcagagaataacaggctacctgtcactaatgacatggcaaaccaaagttgcttcattactgcgattgcgttcctaaagtttgaagtcctggcacctgtacagcggcttgctgggtttgcgcctgctcaaactgaagctgttcagagtggagtcggcgttgcagttcgtaatcctgcaacattgcattaatgcgacgacgctgctcctgtacctgctgctgttgaccattgtttgcggtcgcttcagaaggtactcccaggcttaccgggctggctttacccatcatcggcagtgtattaaataccggcgtttcgggctgctgggacgtttcagattgtccattatagtgctggacgccaacgataactgcaagcgatacgcatgctgctacgcccatttgggtaagctgtgccgcccacggacgtactttctgccagaatggcattttgtgccattgatgcggcgcaggctgggcttccgggatcaatgtcgccggttgacgtactggctcttcttcaatggcggccatcacgcgtgaagagatatcgaaatggagcacctcgggagtatcaccccgcattgaatcacggattaagtgatagctttcccaggttttctgcatttctgggttatgagccagttcgttaagcagctcactatccagcgtttcgccatccattaaagcggaaagttgttctttctgcatgcctaatacccttatccagtatcccgctatcgtcaacgcctgataagcggttgaactttgttatcaatagcttccctcgctcggaagatacgtgaacgcaccgtacctaccggacaatccatgatagcggctatctcttcatagctcaggccatccagctcccgcaaggttattgccatgcgcaaatcttccgggagggactcaatagttcggaaaactatctgtctcagttcttctgacaacattaagttctcagggttcgaaatttctttcaacgcgccgccactttcgaagttttcagcttcaatggcatccacatcactggaaggtggacgacgcccctgagcaaccaggtaatttttcgctgtatttacagcaatccgatacagccatgtataaaaagcgctatctccccggaacgaatccagcgcacgataggctttaataaaagcttcttgtaccacatcgggaacatcacccgacggcacatagcgggaaaccagactcgccactttatgctgatagcgcactaccagtaagttaaaggctttctgatctcccttctggacccgttcaaccaggacctggtccgttaactgctcgctcatccgaggtaaagtctccccaaaccaaatttccacgcgctatcgaaacgccactccattagctgcaatttgagcaagcaaagggttagagtgtctcgtttttgtaaagttccgtaacgcatctgtttttgtttgtcatgctgtagacggatcattatctatcattataagtctacagaatctgaacatcgcattatctgtgtagaaatgcccatttaactgcctgaagagtaacccaacggcctttttatttcaccacctaatcctccaccagccagtaacttctctttttctcgccgccctgcgtcaacgtgtttagccactgtaacaaatattaaaatagcaggtgtttattcgcacaacatgatgctatgctgaccaaacaatgtttagtaaattaaacaaagaaaatgaatactctccctgaacattcatgtgacgtgttgattattggtagcggcgcagccggactttcactggcgctacgcctggctgaccagcatcaggtcatcgttctaagtaaaggcccggtaacggaaggttcaacattttatgcccagggcggtattgccgccgtgtttgatgaaactgacagcattgactcgcatgtggaagacacattgattgccggggctggtatttgcgatcgccatgcagttgaatttgtcgccagcaatgctcgttcctgtgtgcaatggttaattgaccagggggttttgtttgatacccacgttcaaccgaatggcgaagaaagctaccatctgacccgtgaaggtggacatagtcaccgtcgtattcttcatgccgccgacgccaccggtagagaagtacaatccacgctggtgagcaaggcgcagaaccatccgaatattcgtgtgctggagcgcagcaacgcagttgatctgattgtctctgacaaaattggcctgccgggcacgcgacgggttgtaggcgcgtgggtatggaaccgaaataaagaaacggtggaaacctgccacgcaaaagcagtggtactggcaaccggcggtgcgtcgaaggtgtatcagtacaccaccaatccggatatttcttctggcgatggcattgctatggcgtggcgcgcgggctgtatgaggtagcctgagtttaacggacactccttcctgaaatagaatggcatcagaaggagctaataatgagcagaaaaacccaacgttactctaaagagttcaaagccgaagctgtcagaacggttcttgaaaatcaactttcgatcagtgaaggcgcttcccgattatctcttcctgaaggcactttaggacaatgggttaccgccgccagaaaagggctcggtactcctggttcccgcacggtggctgaactggaatctgaaattctgcaactgcgtaaggcgttaaatgaagctcgccttgagcgagatatattaaaaaaagcaacagcgtattttgcacaggagtcgctgaaaaatacgcgttaatcggtgatgctgccaacttactgatttagtgtatgatggtgtttttgaggtgctccagtggcttctgtttctatcagctgtccctcctgttcagctactgacggggtggtgcgtaacggcaaaagcactgccggacatcagcgctatctctgctctcactgccgtaaaacatggcaactgcagttcacttacaccgcttctcaacccggtacgcaccagaaaatcattgatatggccatgaatggcgttggatgccgggcaactgcacgcattatgggcgttggcctcaacacgattttacgtcacttaaaaaactcaggccgcagtcggtaacctcgcgcatacagccgggcagtgacgtcatcgtctgcgcggaaatggacgaacagtggggctatgtcggggctaaatcgcgccagcgctggctgttttacgcgtatgacagtctccggaagacggttgttgcgcacgtattcggtgaacgcactatggcgacgctggggcgtcttatgagcctgctgtcaccctttgacgtggtgatatggatgacggatggctggccgctgtatgaatcccgcctgaagggaaagctgcacgtaatcagcaagcgatatacgcagcgaattgagcggcataacctgaatctgaggcagcacctggcacggccgggacggaagtcgctgtcgttctcaaaatcggtggagctgcatgacaaagtcatcgggcattatctgaacataaaacactatcaataagttggagtcattaccgcgttaatcgaacaatggcgacaacaatttcccattgaagcgatgtgtcaggtatttggtgtatccaggagcggttattacaactgggtacagcatgaaccctcagacagaaaacaaagtgatgagcggctaaaactggagattaaggtggcacatatccgcactcgcgaaacatatggaacccggcggctccagacggagctggcagagaatggcatcatcgttggtcgtgaccgactggcacgtcttcgtaaggagctaaggctacgctgtaagcagaaacgcaagttcagagcgactacgaactcgaaccacaatctgccagttgcgccaaatctgctgaaccagacgttcactcctacagcaccaaatcaggtctgggtggcggacctgacgtatgttgccacacaggagggatggttgtacctcgctggcatcaaagatgtttatacgtgcgaaattgtcggctacgccatgggagagcgcatgacaaaagagctgacaggtaaagccctgtttatggcgctcaggagccagcgcccacctgccgggctaatccaccactctgatcgaggttcacagtactgcgcatacgattaccgggtcatacaggagcagtctggtctgaaaacatcaatgtcgcgtaaaggtaactgttacgacaacgctccgatggaaagcttctggggaacgctgaaaaatgagagcctgagccactatcgttttaataaccgggatgaagccatctcagtaatacgggaatacattgagattttctacaatcgtcagcgtcgtcactctcgtctggggaatatctccccggcagccttcagggaaaaatatcatcagatggctgcttaaaaaaagaacaaatggtagtgtccgctattgccagtacacctcagtcgggttgccaatctcgaatttaatcagttcccccctaccgcactgtatcacccacaggcacgcaatttcctgttaacggaagcactgcgcggcgaaggcgcttatctcaagcgcccggatggcacgcgttttatgcccgattttgatgagcgcggcgaactggccccgcgcgatattgtcgcccgcgccattgaccatgaaatgaaacgcctcggcgcagattgtatgttcctcgacatcagccataagcccgccgattttattcgccagcatttcccgatgatttatgaaaaattgctcgggctggggattgatctcacacaagaaccggtaccgattgtgcctgctgcacactatacctgcggtggtgtaatggttgatgatcatgggcgtacggacgtcgagggcttgtatgccattggcgaggtgagttataccggcttacacggcgctaaccgcatggcctcgaattcattgctggagtgtctggtctatggctggtcggcggcagaagatatcaccagacgtatgcctgatgcccacggcgtcagtacgttaccaccgtgggatgaaagccgcgttgagaaccctgacgaacgggtagtaattcagcataactggcacgagctacggctgtttatgtgggattacgtcggcattgtgcgcacaacaaaacgtcttgagcgcgccctgcggcgtatcaatatgttgcaacaggaaatagacgaatattacgcccacttccgcgtgtcgaataatttgctggagctgcgtaatctggtacaggttgccgagttgattgttcgctgtgcgatgatgcgcaaggagagtcgtggcctgcattttacgctggattacccggaactgctcacgcattccggtccatcgatccttccccccggcaatcattacataaacagataaaaagcctgggtcagcgccgtatacgcttcggaatagttctggtctggcccacgaatgactaagcgatcgctaaagcattctcccgcctgcggggagaatgccagcagcacccgatgcggcagtcgcgcttcgttttccgccacatccgtccgcaaacgtaaatgccagcccatgcttaatgccagttcagtaaaaccattaccaacctgctctggcagcaccacgcagaaaaatccctcttcggtaatgcactccgccgcacaggtcagcagcgatgggtgatcaagcgtagtggtatagcgagcctgttcccgttgaggtgtcgcgcactctactccctgctgatagtaaggtgggttactgatgattaaatcgaagcgtactgtctgctgtgtgagccactgctgaatatccgccgtatggacgttaatccgctctgcccacggggactggttgatattttcctgcgcctgcgcggcagcttcactttccagctcaacggcatcaattatcacgctgtcactggttcgctgcgccagcatcagtgccagcaacccgctacccgcgccgatatcaaggcaacgtttcaccccagccaccggtgcccatgcgcccagcaaaatgccatccgttcccactttcatcgcacagcgatcgtgagcaacaaaaaactgtttaaaagtaaatccattacgacgaagcacggatgtagactgtgacatgaaaataaaaccttgcaggaaaaacggcgatagcaccgggtgagaacaatacccgagaagcgatatccatacaaacagatgaagattgcagccgtaacgtctataatcagcgccccacacagaggtagaacatgactgtaacgactttttccgaacttgaactcgacgaaagcctgctggaagccctccaggataaaggtttcactcgcccgaccgccattcaggctgccgccattccgcctgcgctcgatggccgtgatgtactcggttctgcgccgacaggcaccggtaaaacggcggcgtatctgctgccagcgttgcagcacctgctcgatttcccacgtaagaaatccggtccgccgcgtattttgatcctcaccccaactcgcgagctggcgatgcaggtggccgatcatgcccgcgaactggcgaaacatacgcatctggatatcgccaccatcaccggcggcgtagcctatatgaaccacgcggaagtgttcagcgaaaatcaggacatcgtggtcgccacgaccggacgtctgctgcaatacataaaagaagagaacttcgattgccgcgcggttgaaacgctgatcctcgacgaagcagaccgtatgctggatatgggcttcgctcaggatatcgaacatattgctggcgaaacgcgctggcgtaaacagaccctgctcttttcggcaacgctggaaggcgatgcgattcaggactttgccgagcgtctgctggaagatccggtggaggtttctgccaatccgtccacccgtgagcgcaaaaaaattcatcagtggtattaccgcgccgatgacctggaacataaaaccgcattgctggtgcatctgttaaaacagccggaagcgacccgctcaattgtgtttgtgcgtaagcgtgaacgtgtgcatgagctggcaaactggctgcgcgaagcgggcatcaacaactgctatctcgaaggtgagatggtacaaggcaagcgtaacgaagcgatcaagcgtttgaccgaaggtcgcgtaaacgtactggttgcaaccgatgttgccgcgcgcggtatcgacattcctgacgtcagccacgtctttaacttcgatatgccgcgcagtggcgatacttatttgcaccgtatcggacgtaccgcgcgcgccggtcgtaaaggcaccgcaatttcgctggtggaagcccatgaccatttgctgctgggcaaggttggccgttacattgaagagccgattaaagctcgcgttattgatgagttacgcccgaaaacgcgtgcgccaagcgagaagcagaccggcaagccatcgaagaaagtactggcaaaacgcgccgagaagaaaaaagctaaagagaaagagaaaccgcgggtgaaaaaacgccatcgcgacaccaaaaatattggtaagcgccgtaaaccaagcggaacgggcgtgccaccgcaaacgacagaagagtaatctcaatgccgggtttaagcctggtattaaaagtgctggcaaacgcaaaactgcctgatgcgctacgcttatcaggcctacgtggctcatgcaatatattgaatttgcacgatcttgtaggccggataaggcgttcacgccgcatccggcatgaataaagcgcactttgtcgacaagttaaatgccgggtttaatcccgacattatttttatccagccacaaaactctcttcaacacactgaataaaagtgtgcatcgccgggctaaccgcttttccagcatggtgtgcgcacatggccgtaatggtctgcgactgttcgccaaaaggcaattcaattaattctccgcactccaactcttttgccaccgcaaaacgcggcaggtagctgactccgatattcgccgcgacacaacgcttgatgctttcgatacttataagctcaatggtgttttccaccgtgatccgccgctgacgcagcgtgctctcaaatatctgccggaagacacattgtggttcattgataataaagctacaggcgttatgtcttcccggctcagtaaaatcgacatctacaatttgtggtgaagccaccagcaccagcgattgttcacccaactctcgtcggttcagggcatcatcattccctacgcgataaaagacgccgacatcggcctcatcattcagtagcgcatcacggatcacgtaacagttcagcgactgcaacgataaacgcacttttggtgcgcgttgccgaaaacgctgcaacacctgcggcattcggtaagagagcaacgtttcgcccgaaacaacgcgtagttccccgtccggatctgactcctttttggcagcctcacgaagcgtatccatcactcgggtaagttcataaatgtgcggcagcaacttttttccttcgcgggtaaggcacatccgtcggccaattttctcaaataactggactgaaaactcctgctcaagctgctgaatatgaaaagtcaccgtcgattgtgtacagcacaatttttgcgaagctcgcaaaaaggaaccctcttccaccacggttttaagcgtaataaaacggcgcagatccataaccccaaacctatcgaaaatatcgaatctagaatataaaaacattcattttttttaaatgttccgtgtcgggtactgtctaccaaaacagaggagataacaagtgacaccgacccttttaagtgctttttggacttacaccctgattaccgctatgacgccaggaccgaacaatattctcgcccttagctctgctacgtcgcatggatttcgtcaaagtacccgcgtgctggcagggatgagtctgggatttttgattgtgatgttactgtgtgcgggcatttcattttcactggcagtgattgacccggcagcggtacaccttttgagttgggcgggggcggcatatattgtctggctggcgtggaaaatcgccaccagcccaacaaaggaagacggacttcaggcaaaaccaatcagcttttgggccagctttgctttgcagtttgtgaacgtcaaaatcattttgtacggtgttacggcactgtcgacgtttgttctgccgcaaacacaggcgctaagctgggtagttggcgtcagcgttttgctggcgatgattgggacgtttggcaatgtgtgctgggcgctggcggggcatctgtttcagcgattgtttcgccagtatggtcgccagttaaatatcgtgcttgccctgttactggtctattgcgcggtacgcattttctattaacgaaaaaaagcggaagaggtcgccctcttccgcttagtaacttgctacttaagccttacaggctttcagtaaaggtacgagcgataacgtcgcgctgctgttccggagtcagagagttaaagcgaactgcataaccggatacacggatggtcagctgcggatatttttccggatgcttaactgcatcttccagagtttcacgacgcagaacgttaacgttcaggtgttgaccaccttcaacgcgaacttctggtttcacttctactggaacttcacggtattcaatgtcacccagtttgcttactgcaaccacttcatcttctgcataacctgcttttgcaacgatgcaacgtgcttcgcctttttcgctgtccagcagccagaaagagttcagcagatcgtcgttagcggctttagtaatctggatacctgtaatcatgtgatgcctccccggcaaaattatttgatttgttcagcctgtcgcggccaattggtaaaaccattgttgcttgagtgtatatatactcctcaaccacccttgattctttgatttaaatcaataaaaaccacacatcgattgtggtcgtaaatggattttattgttttacatcaacttatgcgggtgtgaaattttaccaatttacatttttttgcactcgtttaagtctaaaaaatgagcatgattttgttctgtagaaagaagcagttaagctaggcggattgaagattcgcaggagagcgagatggctaacgaattaacctggcatgacgtgctggctgaagagaagcaacaaccttattttcttaatacccttcagaccgtcgccagcgagcggcagtccggcgtcactatctatccaccacaaaaagatgtctttaacgcgttccgctttaccgagttgggtgacgttaaagtggtgattctcggccaggatccttatcacggaccgggacaggcgcatggtctggcattttccgttcgtcccggcattgccattcctccgtcattattgaatatgtataaagagctggaaaatactattccgggcttcacccgccctaatcatggctatctcgaaagctgggcgcgtcagggcgttctgctgctcaatactgtgttgacggttcgcgcaggtcaggcgcattcccacgccagcctcggttgggagacgtttactgataaagtcatcagcctgattaaccagcaccgcgaaggcgtggtgtttttgttgtggggatcacatgcgcaaaagaaaggggcgattatagataagcaacgccatcatgtactgaaagcaccgcatccgtcgccgctttcggcgcatcgtggattctttggctgcaaccattttgtgctggcaaatcagtggctggaacaacgtggcgagacgccgattgactggatgccagtattaccggcagagagtgagtaaatttgcggggaaatgccggatggcagagttgccacccggctgatttatcaggctttattctgacgccaccattcaccaagcaaaacgccggttgcgacagagatattcagcccggcaacgttgcccgtaccgtcaatcttcacgcgcagatcgttcggatcgcgtgcggcatccggtaacccttcatattcctgacccagcaccagtaccattttcgctggcagactagttttgaacagcggtttaccctgctcgctggaagtggtcactacggtgtaacctgcctgacggaaatcatccagcacgttaacaatgttgtcgccagtaatcggctgaacgtgctctgcgccgccttctgcggtacggatagccgcccccgactccagcagtgccgcatcctgcaccacgacacctttcacgccgaagtgcgcgcagctgcgcatcatgccacccaggttatgcgggttagattcattttccagtgccagaacgcaatcctgcgcgcctgcctggcttacccactgctgcacggttgtaccgttacgctttttgatcaggaagcaaacgccgccgtgatgttccgtgcctgacgcttttgtcaattcagcttcatccaccacatggtacgctttgcggtttgccgccatccagcgcaaggcttctttaaaacgtggcgttacgctctggataaaccaggcgcgaacaattgcttccggacggctctggaacagtgcctgacaggcattttcgccgtagacgcgggtttcttccgcacgctgacgacgcaacacttccggatcaataaaacttttaccactgatgccaccgtgatcggccttttccggcgtctcatcacccggcgcgcgggaaaccgtgcgccacggcgaatcttcccacttgcggtcacggggctgactctgtttgtcatcgcgggcggggcgacggccaccgtcagcacgagattttcctggacgcccgccccctttcccggtacgcgggttgtgggtacgtttatcagaatcatcatcactgcggacatacatcactttgaccttgccgcttttacctttcatttcatcgttcatgcttttctccaccagcgctgcgcgaagcgcgcagattacccgaagtccgcgcggttcgccatgatttcgtaccaaagcctgcgactatcatacctattgaataaaacagattgttgtctggaacaatgtccccgataatatgtaacatattagaaacataccggcgtcgttgccgataagtctccttactcatcccgaggttagttatgaataccgtttgtacccattgtcaggccatcaatcgcattcccgacgatcggatcgaagatgcggcaaaatgcggacgctgcggtcacgacttgtttgacggagaggtgattaatgcgaccggtgaaacactcgacaaattgctgaaggatgatctacctgtggtgatcgacttctgggcaccgtggtgcggcccctgccgtaatttcgcaccaatttttgaagatgtcgcgcaagagcgtagcggtaaagtgcgctttgtgaaagtgaataccgaagctgaacgtgaattgagcagtcgctttggaattcgtagtataccgacgatcatgattttcaaaaacggtcaggttgtcgacatgcttaatggcgcagtaccgaaagcgccgttcgatagctggctgaacgaatctctttaatcttaccggggtgcatcttgtgccccgttttctcctctgcgacaatggcgttttttcgacgctctcttatgaccgaaaacgctgttctccagttacgcgccgagcgtattgcgcgcgcaacacgtccttttcttgcccgcggtaatcgcgttcatcgctgccaacgctgtcttttgccagagaaattatgtctctgttcgacaattaccccagcacaagcaaaaagtcgcttctgtttgctgatgttcgacaccgagccaatgaagcccagtaataccgggcgtctgattgctgatattttgcctgataccgttgcgtttcaatggtcgcgtaccgaaccctcgcaggatttgctggatctggtacaaaacccggattatcagccaatggtggtctttcccgcctcgtatgctgatgagcaacgggaagtgatcttcacaccacctgccggtaagccaccgctgtttatcatgctcgatggtacctggccggaagctcgcaagatgtttcgtaaaagtccgtatctggataatcttcccgtcatttccgtcgatctttcccggctttctgcctatcgcctgcgtgaagcccaggctgcaggccaatattgtactgccgaggtagccatcgcactgttagatatggccggcgataccggggcggcagcagggttaggcgagcattttacccgctttaaaacacgctatctggcaggaaaaacgcaacatctgggtagcatcacagcagaacagttagaaagcgtttaaaatcattcggtcacttctgcgggagaccggtatgagtcagcgaggactggaagcactactgcgaccaaaatcgatagcggtaattggcgcgtcgatgaaacccaatcgcgcaggttacctgatgatgcgtaacctgctggcgggaagctttaacggaccggtactcccggtgacgccagcctggaaagcggtgttgggtgtgttggcctggccggatattgccagcttgccctttacacccgaccttgcggttttatgtaccaatgccagccgtaatcttgctcttctggaagagctcggcgagaaaggctgtaaaacctgcattattctttccgccccggcatcgcaacacgaagatctccgcgcctgcgccctgcgccataacatgcgcctgcttggaccaaacagtctgggtttactggctccctggcaaggtctgaatgccagcttttcgcctgtgccgattaaacgcggcaagctggcgtttatttcacaatcggcagccgtctccaacaccatcctcgactgggcgcaacagcgtgagatgggcttttcctactttattgcgctcggcgacagcctggatatcgacgttgatgaattgctcgactatctggcgcgcgacagtaaaaccagcgccatcctgctctatctcgaacagttaagcgacgcgcgacgctttgtttcggcagcccgtagtgcctcgcgtaataaaccgattctggtgattaaaagcggacgtagcccggcggcacagcgactgctcaacacgacggcaggaatggacccggcatgggatgcggctattcagcgtgccggtttgttgcgggtacaggatacccacgaactgttttcggcggtggaaacccttagccatatgcgcccgctgcgtggcgaccggttgatgattatcagcaacggtgctgcgcctgccgcgctggcgctggatgccttatggtcacgcaatggcaagctggcaacgctaagcgaagaaacctgccagaaattgcgcgatgcattgccagaacatgtggcagtctctaaccctctcgatctgcgcgatgacgccagcagcgagcattatgtcaaaacgctggacattctgctccacagccaggattttgatgcgctgatggttattcattcgcccagcgccgctgctcccgcaacagaaagcgcgcaagtattaattgaagcggtaaagcatcatccccgcagcaaatatgtctctttgctgacgaactggtgcggcgagcactcctcgcaagaggcacgacgtttattcagcgaagccgggctgccgacctaccgtaccccggaaggaaccatcactgcttttatgcatatggtggagtaccggcgtaatcagaagcaactacgcgaaacgccgacgttgcccagcaatctgacttccaataccgcagaagcgcatcttctgttgcaacaggcgattgccgaaggggctacgtcgctcgatacccatgaagttcagcccatcctgcaagcgtatggcatgaacacgctccctacctggattgccagcgatagcaccgaagcggtgcatattgccgaacagattggttatccggtggcgctgaaattgcgttcgccggatattccacataaatcggaagttcagggcgtcatgctttacctgcgtacagccaatgaagtccagcaagcggcgaacgctattttcgatcgcgtaaaaatggcctggccacaggcgcgggtccacggcctgttggtgcaaagtatggctaaccgtgctggcgctcaggagttgcgggttgtggttgagcacgatccggttttcgggccgttgatcatgctgggtgaaggcggtgtggagtggcgtcctgaagatcaagccgtcgtcgcactgccgccgctgaacatgaacctggcccgctatctggttattcaggggatcaaaagtaaaaagattcgtgcgcgcagtgcgctacgcccattggatgttgcaggcttgagccagcttctggtgcaggtttccaacttgattgtcgattgcccggaaattcagcgtctggatattcatcctttgctggcttctggcagtgaatttaccgcgctggatgtcacgctggatatctcgccgtttgaaggcgataacgagagtcggctggcagtgcgcccttatccgcatcagctggaagaatgggtagaattgaaaaacggtgaacgctgcttgttccgcccgattttgccagaagatgagccacaacttcagcaattcatttcgcgagtcaccaaagaagatctttattaccgctactttagcgagatcaacgaatttacccatgaagatttagccaacatgacacagatcgactacgatcgggaaatggcgtttgtagcggtacgacgtattgatcaaacggaagagatcctcggcgtcacgcgtgcgatttccgatcctgataacatcgatgccgaatttgctgtgctggttcgctcggatctcaaagggttaggcttaggtcgacgcttaatggaaaagttgattacctatacgcgagatcacggactacaacgtctgaatggtattacgatgccaaacaatcgtggcatggtggcgctagcccgcaagctcgggtttaacgttgatatccagctcgaagaggggatcgttgggcttacgctaaatcttgcccaacgcgaggaatcatgagtaaggtactggaaatgttgaccacttaatcgggactggtgttattattgcccgcttatgtcgtctgcattgcacagaggacccttcaatgaacagagaagaaatgcactgtgatgttgtcaaaatttaagcgtaataaacatcaacaacaccttgcccaactacccaagatttctcaatcagttgatgatgtcgatttcttttacgctcccgccgacttccgggagacgctgctggaaaaaatagccagcgcgaagcagcgcatttgcattgtcgccctgtatctcgaacaggatgacggtggcaaaggcattctgaacgcgttgtatgaagctaaaaggcagcgtccggaactggatgtgcgggtgctggtcgactggcatcgtgcacaacgtggacgcattggcgctgcggcatctaacactaacgctgactggtactgccgcatggcgcaggaaaattcgggcgtagatgttccggtttatggcgttccaatcaatacccgtgaagcccttggtgttctgcactttaaaggctttatcatcgacgatagcgtactttatagcggtgccagcctgaacgatgtttacctgcatcagcacgataaatatcgctacgaccgttatcatcttatccgtaaccgtaagatgtcagacattatgtttgaatgggttacacagaatattatgaatggccgcggcgttaatcgtctggatgatgttaatcggccaaaaagcccggaaatcaagaacgatattcgtctgttccgccaggagctgcgtgatgccgcttatcatttccagggcgatgccgacaacgatcagctttccgtaacgccgctagtggggctggggaaatcgagtctgttgaacaagaccattttccatcttatgccttgtgccgagcagaaactaaccatctgtacgccatacttcaacctgccagcaatccttgtgcgcaatattatccagttgctgcgcgaagggaaaaaggtcgaaattattgttggtgataaaaccgcgaacgacttctacattccggaagatgaacctttcaagataattggcgcattgccttatctctatgagatcaatctgcgtcgtttcctgagccgtttgcagtattacgtcaatactgaccagctagtggttcggttatggaaagatgacgacaacacctatcacctgaaagggatgtgggttgatgataagtggatgttgatcaccggtaataacctgaacccgcgcgcctggcgtctggatctggaaaacgccattttgatccacgatccacaactgaagcttgcgccgcagcgagagaaagaactggagctgatccgcgagcataccaccatcgttaagcactatcgcgatctgcaaagtattgccgattatccggtgaaggttcgtaaactcatccgccgtttgcgccgtatccgcatcgaccgattaattagccgcatcctgtaatcacaaccccgtcctgtacggggtttgttttttggaggccacgttttgcgtattctttttgtctgttcgctattgttactttctggatgcagccatatggctaacgatagctggagcgggcaggataaagctcaacactttatcgcctcggcgatgctttccgccgccggaaatgaatattcacagcatcaggggatgagccgggatcgcagtgccatgtttggattgatgttctctgtcagtttgggggcgtcaaaagagctttgggatagccgccccgaagggagcggctggagctggaaggatttggcctgggatgtcgccggtgcaagcaccggctataccgtctggcaactgacccgtcactaaagacgcatccccttccctttgcgatgtagcatcaaagaaaccagaaacgccaccacggccatcaaggtcacataccagaagaaggctgtttccattcctattgatttcagcgacaacgctacgtactccgccgaaccaccaaatatagcattagcgaccgcatatgacaggccaacgcctaatgcgcgaacctgtgccgggaacatctcagccttcagtattccactgattgatgtataaaaactcactatcagcagggcacacatcaccagaccaaaagcggcataaggcgaggaaacgttttgcaatgctgagagaataggaacggtaaaaatggctgccagcgaaccgaaacataacattgaggtacggcgaccaatcttatccgacagcgcgccaatgagtggttgaataagcatgaatacaaacaatgcggcagtcataatgccactcgccacgttgacatgcattcccgcagtatttaccagatacttctgcatataagtagtgaaggtatagaaacaaagggagcccgcagcggtaaaaccgagaaccatgatgaatgcacggcgattgcgccataatcctttcagagatccagcttcttttaaagcgcgcgtttcttgttgcgaagtttcatctaactgacgacgtaaccacaacgccacaacagctaacacagctcctaacgcgaaaggaatacgccatccccactctctgagtgcagcgtcttccatggtgtgttgtaaaaccacgacaaccagtagggctagcagttgtccgccgatcaacgtcacatactgaaatgatgcgtaaaaacctttgcgcccttcaacggcaacttcactcatataggtggcgctggtgccatattctccgccaacggataatccctgaaataaacgcgcgagaagcaataatgccggagcccacgtaccgattgtttcataaccaggcaaacaggcgattaccagtgagccgaaacacatcatacacaccgatagcagcatcgattttttgcgaccatgtttatcggctatgcggccaaatagccaaccgcctattgggcgcatcaggaatcccgcagcaaaaacacctgctgtttgtagtagttgagtcgtcgtgttcccggaagggaagaagatgtgggcgaagtagagtgaacagaacgagtagacatagaaatcgaaccactcgaccagattacctgaagaggcccccacaattgcccaaatgcggcgacgagtatcactacttgtcagtttgctgtctgccgttacagtactttcagccatgccattatgtctcctgccgtaatccgatgcttttgtcggtcgcttttgtttattttttttggtaaaggaaatgttatacatttgttgcatatcattgtgcaaccttaaccatgaatttagttagcaggaaaatggttattgaggagcttaaggataaatttctggtaaggaggacacgtatggaagtgggcaagttggggaaaccgtatccgttgctgaatctggcatatgtgggagtataagacgcgcagtgtcgcatcaggcatttttttctgcgccaatgcaaaaaggccatccgtcaggatggcctttcgcttaatttgatgcctggcagttccctactctcgcatggggagaccccacactaccatcggcgctacggcgtttcacttctgagttcggcatggggtcaggtgggaccaccgcgctacggccgccaggcaaattctgttttatcagaccgcttctgcgttctgatttaatctgtatcaggctgaaaatcttctctcatccgccaaaacatcttcggcgttgtaaggttaagcctcacggttcattagtaccggttagctcaacgcatcgctgcgcttacacacccggcctatcaacgtcgtcgtcttcaacgttccttcaggacccttaaagggtcagggagaactcatctcggggcaagtttcgtgcttagatgctttcagcacttatctcttccgcatttagctaccgggcagtgccattggcatgacaacccgaacaccagtgatgcgtccactccggtcctctcgtactaggagcagcccccctcagttctccagcgcccacggcagatagggaccgaactgtctcacgacgttctaaacccagctcgcgtaccactttaaatggcgaacagccatacccttgggacctacttcagccccaggatgtgatgagccgacatcgaggtgccaaacaccgccgtcgatatgaactcttgggcggtatcagcctgttatccccggagtaccttttatccgttgagcgatggcccttccattcagaaccaccggatcactatgacctgctttcgcacctgctcgcgccgtcacgctcgcagtcaagctggcttatgccattgcactaacctcctgatgtccgaccaggattagccaaccttcgtgctcctccgttactctttaggaggagaccgccccagtcaaactacccaccagacactgtccgcaacccggatcacgggtccacgttagaacatcaaacattaaagggtggtatttcaaggtcgactccatgcagactggcgtccacacttcaaagcctcccacctatcctacacatcaaggctcaatgttcagtgtcaagctatagtaaaggttcacggggtctttccgtcttgccgcgggtacactgcatcttcacagcgagttcaatttcactgagtctcgggtggagacagcctggccatcattacgccattcgtgcaggtcggaacttacccgacaaggaatttcgctaccttaggaccgttatagttacggccgccgtttaccggggcttcgatcaagagcttcgcttgcgctgaccccatcaattaaccttccggcaccgggcaggcgtcacaccgtatacgtccactttcgtgtttgcacagtgctgtgtttttaataaacagttgcagccagctggtatcttcgactgatttcagctccatccgcgagggacttcacctacatatcagcgtgccttctcccgaagttacggcaccattttgcctagttccttcacccgagttctctcaagcgccttggtattctctacctgaccacctgtgtcggtttggggtacgatttgatgttacctgatgcttagaggcttttcctggaagcagggcatttgttgcttcagcaccgtagtgcctcgtcatcacgcctcagccttgattttccggatttgcctggaaaaccagcctacacgcttaaaccgggacaaccgtcgcccggccaacatagccttctccgtccccccttcgcagtaacaccaagtacaggaatattaacctgtttcccatcgactacgcctttcggcctcgccttaggggtcgactcaccctgccccgattaacgttggacaggaacccttggtcttccggcgagcgggcttttcacccgctttatcgttacttatgtcagcattcgcacttctgatacctccagcatgcctcacagcacaccttcgcaggcttacagaacgctcccctacccaacaacgcataagcgtcgctgccgcagcttcggtgcatggtttagccccgttacatcttccgcgcaggccgactcgaccagtgagctattacgctttctttaaatgatggctgcttctaagccaacatcctggctgtctgggccttcccacatcgtttcccacttaaccatgactttgggaccttagctggcggtctgggttgtttccctcttcacgacggacgttagcacccgccgtgtgtctcccgtgataacattctccggtattcgcagtttgcatcgggttggtaagtcgggatgacccccttgccgaaacagtgctctacccccggagatgaattcacgaggcgctacctaaatagctttcggggagaaccagctatctcccggtttgattggcctttcacccccagccacaagtcatccgctaatttttcaacattagtcggttcggtcctccagttagtgttacccaaccttcaacctgcccatggctagatcaccgggtttcgggtctataccctgcaacttaacgcccagttaagactcggtttcccttcggctcccctattcggttaaccttgctacagaatataagtcgctgacccattatacaaaaggtacgcagtcacacgcctaagcgtgctcccactgcttgtacgtacacggtttcaggttctttttcactcccctcgccggggttcttttcgcctttccctcacggtactggttcactatcggtcagtcaggagtatttagccttggaggatggtccccccatattcagacaggataccacgtgtcccgccctactcatcaagctcacaatatgtgcatttttgtgtacggggctgtcaccctgtatcgcacgcctttccagacgcttccactaacacacacactgattcaggctctgggctgctccccgtccgctcgccgctactgggggaatctcggttgatttcttttcctcggggtacttagatgtttcagttcccccggttcgcctcattaacctatggattcagttaatgatagtgtgacgaatcacactgggtttccccattcggaaatcgccggttataacggttcatatcaccttaccgacgcttatcgcagattagcacgtccttcatcgcctctgactgccagggcatccaccgtgtacgcttagtcgcttaacctcacaacccgaagatgtttctttcgattcatcatcgtgttgcgaaaatttgagagactcacgaacaactttcgttgttcagtgtttcaattttcagcttgatccagatttttaaagagcaaatatctcaaacatcacccgaagatgagttttgagatattaaggcaggtgactttcactcacaaaccagcaagtggcgtcccctaggggattcgaacccctgttaccgccgtgaaagggcggtgtcctgggcctctagacgaaggggacgtatcagtctgcttcgcaagacgccttgcttttcactttctatcagacaatctgtgtgagcactgcaaagtacgcttctttaaggtaaggaggtgatccaaccgcaggttcccctacggttaccttgttacgacttcaccccagtcatgaatcacaaagtggtaagcgccctcccgaaggttaagctacctacttcttttgcaacccactcccatggtgtgacgggcggtgtgtacaaggcccgggaacgtattcaccgtggcattctgatccacgattactagcgattccgacttcatggagtcgagttgcagactccaatccggactacgacgcactttatgaggtccgcttgctctcgcgaggtcgcttctctttgtatgcgccattgtagcacgtgtgtagccctggtcgtaagggccatgatgacttgacgtcatccccaccttcctccagtttatcactggcagtctcctttgagttcccggccggaccgctggcaacaaaggataagggttgcgctcgttgcgggacttaacccaacatttcacaacacgagctgacgacagccatgcagcacctgtctcacggttcccgaaggcacattctcatctctgaaaacttccgtggatgtcaagaccaggtaaggttcttcgcgttgcatcgaattaaaccacatgctccaccgcttgtgcgggcccccgtcaattcatttgagttttaaccttgcggccgtactccccaggcggtcgacttaacgcgttagctccggaagccacgcctcaagggcacaacctccaagtcgacatcgtttacggcgtggactaccagggtatctaatcctgtttgctccccacgctttcgcacctgagcgtcagtcttcgtccagggggccgccttcgccaccggtattcctccagatctctacgcatttcaccgctacacctggaattctacccccctctacgagactcaagcttgccagtatcagatgcagttcccaggttgagcccggggatttcacatctgacttaacaaaccgcctgcgtgcgctttacgcccagtaattccgattaacgcttgcaccctccgtattaccgcggctgctggcacggagttagccggtgcttcttctgcgggtaacgtcaatgagcaaaggtattaactttactcccttcctccccgctgaaagtactttacaacccgaaggccttcttcatacacgcggcatggctgcatcaggcttgcgcccattgtgcaatattccccactgctgcctcccgtaggagtctggaccgtgtctcagttccagtgtggctggtcatcctctcagaccagctagggatcgtcgcctaggtgagccgttaccccacctactagctaatcccatctgggcacatccgatggcaagaggcccgaaggtccccctctttagtcttgcgacattatgcggtattagctaccgtttccagtagttatccccctccatcaggcagtttcccagacattactcacccgtccgccactcgtcagcgaaacagcaagctgtttcctgttaccgttcgacttgcatgtgttaggcctgccgccagcgttcaacctgagccatgatcaaactcttcaatttaaaagtttgatgctcaaagaattaaacttcgtaatgaattacgtgttcactcttgagacttggtattcatttttcgtcttgcgacgttaagaatccgtatcttcgagtgcccacacaaattgtctgataaattgttaaagagcagtgccgcttcgctttttctcagcggcgcggggtgtgcataatacgctttcccgctacagagtcaagcatttatttttgctttctctgccggaattctcaggagaaccccgccgacccggcggcgtgtttgccgttgttccgtgtcagtggtggcgcattatagggagttattccggcctgacaagcgaaaaatataaaaactttatcgttcgctcatttttcaggcaaaacatcttaaatatagtcttttccgtctaacttatagacaaaaacgagccccgaagggctcgttttatcattactggacagcgacaatccggtcttcattaacttccaggcgaatcactttacccggaaccaattcaccagacagtatttgctgtgccagcgggttttcgatctgctgctggatagcacgtttcaaaggacgtgcaccatagactggatcgtaaccgttctcgctcagcagtttcagcgcctcgtcagaaatgtggatttcataaccacgttcttccagacgtttgtacagacgtttcaactgaatctgcgcaatcgaggcaatgtgctgttcacccagcggatggaagaccaccacttcatcaatacggttaatgaattccggacggaagttatggcttaccacaccgagcaccagctctttcatgtgcgcataatccagttcaccgaagcgttcctgaatcaaatcggaaccgaggttagaggtcataatgacaaccgtattacggaagtcgaccgttctcccctgcccgtcagtcagacgaccatcatccagtacctgcaacagaatgttgaagacatccggatgcgctttttccacttcatccagcaggatgacggaatacggacgacgacgcacagcttcggtcaggtagccaccttcttcataaccgacatatcccggaggcgcaccaaccagacgagacaccgagtgtttctccataaactcggacatatcgatacggaccatcgcctcgtcgctatcaaacataaagttcgccagcgccttacaaagctcagttttccccacacccgttgggccgaggaacaggaatgaaccaatcgggcgatttggatccgccaaccccgcacggctacggcgaatagcgttagataccgcatcaaccgcttcgttctgaccaatgacgcgatggtgcagttcttgctccatacgcagcagtttttcgcgctcgctttccatcatgcgagaaaccggaatccccgtccaacgcgccagcacttcagcaatttcggcgtcggtcactttattacgcaacagacgcatagttttgccttcgagctgcgttgcggcttccagttgcttttccagttccgggattttgccgtattgcagttcagacatccgcgccaggtcccccacacggcgagcctgttcaatagcgattttcgcctgttccagttccgctttaatggtctgcgtaccagaaagcgatgccttctctgctttccactcttcttctaactcggagtactgacgttctttgtcgctcagttcttcgttgagcatatccaagcgttttttactggcttcatcagactctttcattaacgcctgttgttccagtttgagctggatgatacgacgatcgagtcggtcgagttcttctggttttgagtcaatctgcatacgaatgctggatgctgcttcatcgatcaggtcgatggctttatccggcagctgacggtcagcaatgtagcgatgagacaacgtcgccgctgcaacaattgccgggtcagtaatttgcacatggtggtgcaattcgtaacgttctttcaggccacgcagaatcgcaatggtatcttcaacagaaggctcggcaacaaacactttctggaaacgacgttccagcgcagcatctttttcaatgtactggcgatattcgtcaagcgtcgtggcacctacgcagtgcaattcaccacgcgccagcgccggtttcagcatgtttccggcgtccattgcgccatcggctttacccgcgccgaccatggtatgtaattcgtcgataaacaggatgacgttgccttcctgtttggcaagatcgttaagcacgccttttaaacgttcttcaaactcaccgcgatatttcgccccagccaccagcgcgcccatatccagcgccagtacgcggcggcctttcaatccttccggcacttcgccgttgataatacgctgcgccagaccttcaacgatggcagttttaccgacgccgggttcaccaatcagtaccgggttatttttagtacgacgttgcagcacctgaatggtacggcgaatttcttcatcacgaccaatcaccggatcgagtttgccctgttcggctcgttcggtaaggtcgatggtatattttttcaaagcctgacgttggtcttcagcaccttgatcgttcacgctttcacctccacgcatttgttcaatcgcttgagtaatgttggcggtggtcgcccctgctgctttcaggatgtcggccagcgtgccgcgagactcaagtgccgccagaacgaacagttctgacgagataaagttatcacctcgtttttgcgccagcttgtcgcaaagattaagaacgcgcaccagatcctgtgatggctggacatcaccaccagtaccttcaacctgcggtaaacgatttaatgcctgattgatatctgtgcgcaactggccagcatttatgccagcggatgttaataaaggactaaccgaacccccttcctgattcagcagggcgctcattaaatgaagtggttcgatgaattggttgtcgtgcccgagtgcaagtgattgggcatcggcaagagcaagctggaatttattagtaagacgatccagacgcataactcctcccataacggatcaaagttgctactggagattaaatgaggtcatccctcaattattcaaggttattgaccagattaatgtgaaaagaaaatcacgcgtaccggatcgtcttgattctttaggttatatcagccaaatgaaacttgccatacgaccggtggtcttgtcgcgacgataagagaagaaagtctcattttccgtatatgtacaacggtcgccgccgaaaatttgctcaacacccacgttcgccagacgctgccgggcaagctgataaatatccgccagatacttatcaccatgctgaatgaaagctgcacttgctttagcgtctactgccataaacgcctcgcgaacctccgcccccacttcgaacgcgcgtggaccaattgccggccctaaccaggcgagaatgttttcaggtttatcagcaaaacaggaaaccgtctcttccagcacgcctgcgcacagtccacgccagccagcatgaacggcggcgacttccgttcccgctcgattgcaaaacagcacagggaggcagtcggcagtcatcactgcgcaaaccgtgccaggcgtattgctataagaggcatctgctcgttttgaggcataaggttcgccagtaagcttaagcacatctttgccgtgtacctgctcaagccagaccggtttagaaggcaaattgcccgcagcaaaaagtcgcttgcgattctcctcaacgtgatccgggttatcgccacaatgggcaccgaggttgagtgagtcatacgggggcaagctcacgccgccgatacgagtggagctacaggccgcaacaccttttggcagtggccactgcgggacaatcagcttactcataaccagtccacttcatccttatgctcttcgaaatcggcgcgcatcacctcaatcagctccaccatatcttgtggaataggcgcatgccattccatttcgatgccagagatcgggtgataaagacgcagcatggttgcatgaagcgcctggcggtcaaacttacgcagcgtggagataaatgcttccgaagcaccttttggcggacgcggacggccaccataaaccggatcgcccaccagcggatgagtgatatgggccatatgcacgcggatctggtgcgtacgtccagtttccagacgcaaccgcagacgcgtgtgcacacggaagtgttccatgatgcgatagtgagtcaccgccggtttgcccatcggatgcaccgccatgtgagtacgtttggtcgggtggcggctgatgggttcatctactgtaccgccagcggtcatatgaccaatcgccaccgcttcatactcacgagtaatttcacgccgttgcaaagattcgactaaacgcgtctgagccggaacggtttttgccacaaccatcaggccggtggtgtctttatccagacgatggacgatgcccgcacgcggtacatcggcaatgggcggataataatgaagcaacgcattcagtaccgtgccatccgggttacccgcgccaggatgtactactaggtcgcgcggtttattaatgacaatgatatcttcatcttcatagacgatatccagcgggatatcctgcggttcaaaacgcgcttcttcttcaatctcagcgttgatggcaacctgctcgccacccaatactttttctttcggcttatcacaaactttgccgttaaccagcacgcgctggtcgaggatccattcttttatccgcgaacgtgaataatccgggaacatttcggccaaagcctgatctaagcgttgaccgagttggttttcggacaccgttgcagtgagctgtactcgttgtgccatatatactgcttcttcgtttatcgttggggttttacggctttgccgtttaatatagtgtgctattgtagctggtcttaaccgggagcaggaacagagaatctcccgtattacattttgaggaaagtcaaaacgtcatgacgcgcatgaaatatctggtggcagccgccacactaagcctgtttttggcgggttgctcggggtcaaaggaagaagtacctgataatccgccaaatgaaatttacgcgactgcacaacaaaagctgcaggacggtaactggagacaggcaataacgcaactggaagcgttagataatcgctatccgtttggtccgtattcgcagcaggtgcagctggatctcatctacgcctactataaaaacgccgatttgccgttagcacaggctgccatcgatcgttttattcgccttaacccgacccatccgaatatcgattatgtcatgtacatgcgtggcctgaccaatatggcgctggatgacagtgcgctgcaagggttctttggcgttgaccgtagcgatcgcgatcctcaacatgcacgagctgcgtttagtgacttttccaaactggtgcgcggctatccgaacagtcagtacactaccgatgccaccaaacgtctggtattcctgaaagatcgtctggcgaaatatgaatactccgttgccgagtactatacagaacgtggtgcatgggttgccgtcgttaaccgcgtagaaggcatgttgcgcgactacccggatacccaggctacgcgtgatgcgctgccactgatggaaaatgcataccgtcagatgcagatgaatgcgcaagctgaaaaagtagcgaaaatcatcgccgcaaacagcagcaatacataacagaaacctgaaacacaaaacggcagcccttgagctgtaatgccgatcagttaaggatcagttgaccgatccagtggctgtgtaagaatccggaaacgctcacttgtttccggatttttttatgcacattggacaggctcttgatctggtatcccgttacgattctctgcgtaacccactgacttctctgggggattacctcgaccccgaactcatctctcgttgccttgccgaatcaggtactgtaacgctacgcaagcgccgtcttcccctcgaaatgatggtctggtgtattgttggcatggcgcttgagcgtaaagaacctcttcaccagattgtgaatcgcctggacatcatgctgccgggcaatcgccccttcgttgcccccagtgccgttattcaggcccgccagcgcctgggaagtgaggctgtccgccgcgtgttcacgaaaacagcgcagctctggcataacgccacgccgcatccgcactggtgcggcctgaccctgctggccatcgatggtgtgttctggcgcacaccggatacaccagagaacgatgcagccttcccccgccagacacatgccgggaacccggcgctctacccgcaggtcaaaatggtctgccagatggaactgaccagccatctgctgacggctgcagccttcggcacgatgaagaacagcgaaaatgagcttgctgagcaacttatagaacaaaccggcgataacactctgacgttaatggataaaggttattactcactgggactgttaaatgcctggagcctggcgggagaacaccgccactggatgatacctctcagaaagggagcgcaatatgaagagctcagaaaactgggtaaaggcgatcatctggtgaagctgaaaaccagcccgcaggcacgaaaaaagtggccgggactgggaaatgaagtgacagcccgcctgctgaccgtgacgcgcaaaggaaaagtctgccatctgctgacgtcgatgacggacgccatgcgcttccccggaggagaaatggcggatctgtacagtcatcgctgggaaatcgaactgggatacagggagataaaacagacgatgcaactgagcaggctgacgctgagaagtaaaaagccggagcttgtggagcaagagctgtggggtgtcttactggcttataatctggtgagatatcagatgattaaaatggcggaacatctgaaaggttactggccgaatcaactgagtttctcagaatcatgcggaatggtgatgagaatgctgatgacattgcagggcgcttcaccgggacgtataccggagctgatgcgcgatcttgcaagtatgggacaacttgtgaaattaccgacgagaagggaaagggccttcccgagagtggtaaaggagaggccctggaaataccccacagccccgaaaaagagccagtcagttgcttaactgactggcattagtcccggtggtgatgtctatctcacaccgatgaacatgaccacgaaaccctccgatggcagtaaggccggtaagcagaaggataacgccaatgcagacgaaacaacgtcttgatgtaccgctgagtctgaaatctgtcagtgactccggtgagtttgaagggtatggctccgtctttggtgtaaaggacagccacgatgatgtggtgatgtccggggcatttgctgcttccctgcgggcgtggagtgacagaaaagcgttacctgcgctgctctggcagcaccgcatggatgaacccatcggtgtttacaccgaaatgaaggaagacgatgtcgggctttacgtcaggggacggttgcttattgatgatgatcccctcgcaaaacgtgcacatgcacacatgaaggccggttcgttaaccggcctttctattgggtacgtcctgaaagactgaggtagcctgagtttaacggacgctccttcctgaaatagaatggcatcagaaggagctaataatgagcagaaaaacccaacgttactctaaagagttcaaagccgaagctgtcagaacggttcttgaaaatcaactttcgatcagtgaaggcgcttcccgattatctcttcctgaaggcactttaggacaatgggttaccgccgccagaaaagggctcggtactcctggttcccgcacggtggctgaactggaatctgaaattctgcaactgcgtaaggcgttaaatgaagctcgccttgagcgagatatattaaaaaaagcaacagcgtattttgcacaggagtcgctgaaaaatacgcgttaatcgaacaatggcgacaacaatttcccattgaagcgatgtgtcaggtatttggtgtatccaggagcggttattacaactgggtacagcatgaaccctcagacagaaaacaaagtgatgagcggctaaaactggagattaaggtggcacatatccgcactcgcgaaacatatggaacccggcggctccagacggagctggcagagaatggcatcatcgttggtcgtgaccgactggcacgtcttcgtaaggagctaaggctacgctgtaagcagaaacgcaagttcagagcgactacgaactcgaaccacaatctgccagttgcgccaaatctgctgaaccagacgttcgctcctacagcaccaaatcaggtctgggtggcggacctgacgtatgttgccacacaggagggatggttgtacctcgctggcatcaaagatgtttatacgtgcgaaattgtcggctacgccatgggagagcgcatgacaaaagagctgacaggtaaagccctgtttatggcgctcaggagccagcgcccacctgccgggctaatccaccactctgatcgaggttcacagtactgcgcatacgattaccgggtcatacaggagcagtttggtctgaaaacatcaatgtcgcgtaaaggtaactgttacgacaacgctccgatggaaagcttctggggaacgctgaaaaatgagagcctgagccactatcgttttaataaccgggatgaagccatctcagtaatacgggaatacattgagattttctacaatcgtcagcgtcgtcactctcgtctggggaatatctccccggcagccttcagggaaaaatatcatcagatggctgcttaaaaaaagaacaaatggtagtgtccgctattgccagtacacctcaaggataaggctaaaaaatcatgacgataagttttaatactgttccgtcgaatacgctggtgccgttgttctacgccgagatgaacaattctgcggcaaatacagcggtgaccagcgcgcctgcattactgatcgggcatgccagcaacgatgcagccattgaggttaacagcctggtgctgatgccatcggcagattatgcccgccagatttgtggggcggggagccagctggcgcgtatggtggaagtctaccgtcagacagatcctttcggtgaactgtatgttattgcagtaccggaagccagaggggcggcggcgacggtcagggtgacggttgccggagaagcagaggaaagcggcaccctgagtctgtatgtcgggcgctcccgtgtacaggtgcctgtggtgaatggcgatgatgccactgcggttgccaccgcgattaaggaagcggtaaacggggttatcaccctgccgtttacggcgtcatctgatgcaggtgtggtgacgctgactgcccgtcataaggggctgtatggtaatgagttaccggtctgtctgaattattatggttctggtggtggtgagattctgccagcagggcttcgggtggtgacggaagtcggtgctgccggtagcggagcgcctgatcttaccgccgctgttgctgctatgggcgatgaggcattcgactttatcggtctgccgttcaacgatgccgcctccatcaatatgatgatgaccgaaatgaatgacagcagcggtcgctggagttatgcgcgccagttatacgggcatgtctataccgcaaaactgggaacgctgtcagagctggttggtgccggagatatgcataatcagcaacatatcacgcttgccggttacgaaaaagaaacccagtcgcctgtcgatgaactggttgccagtcgccttgcccgtgaagcggtatttatccggaatgatcctgcccgtccgacacagacgggggagctggtggggatgcttccggcaccgaaaggtaagcgattcatcatgacagagcagcagacccttttatctcacggcgtggcgacggcttatgtggaaggcggcacgttgcagatccagcgttccgtaaccacctacaaaaagaatgcgtatggcgtggcagacaacagctatctggacagtgaaactctgcataccagtgcatatgttcttcgcaaactgaaatcggtcatcacaagcaagtacggacgtcacaagctggcaaatgatggtacccgttttggtccggggcaggcgattgtcactcctgccgttatcaaaggggaacttctggcgacatatcgtcagatggagcgtgccggtattgtggaaaattacgatctgtttaaacagtatctgatagttgagcgtgatgcagataacccgaaccgactgaatacgctgttcccgccggattatgttaatcagttacgtgtctttgcggtggttaaccagttccgtcttcagtattcagaggagtcagcataatggcaaagatcgccggaacctgtttttttaaagtggatggtcagcagttatcgctgacaggtggcattgaagtgccgatgaacaccaatgtccgggatgacatcgtcggcatggcaggggatgtggattacaaggagacctggcggtcaccttacgttaagggcacgtttaaagtgcccaaaaactttccggtcgacaaaattaccacctcagaccagatgacgattaccgctgagctggcaaacggcatggtgtatgtgctttcggcggcatggctgcacggagaggctaatcataatgccgaagaaggcacggcagatcttgaattccacggcgaagagggagggtatcagtaatggcaatgaacgttacagaaatagttttaaaaaaaccggtgacagcgcataacgaaatgctgcatgtgctggagttgcgcgagcccacgtatgacgaaatcgaggcgctgggttttcctttcattatttccggtgaaggcagtattaaactggacagccaggtggcactgaaatatatcccgttgctggcggggatcccgcgttcatcggcggcgcagatggcaaaactggatatttttaagaccagcatgcagatcctgcgtttttttacccagtcggagacgggaagcacctccggaaacgactctacaatgttgcctggttctggaaactgaatccactggagctgcgacggggggctgtttcgcagtttacagaactggaagccgaggccgtccgcattaacgaggagatgaagcatggctgacagttttcagctgaaggcgatcatcactgccgtggataaggtatcggcaccgctgaagggaatgcagcgccagctgaaaggttttaaaaaggagtttgccagcctgttactgggcgcagcgggtgccggaaccgcagtactgggggcgctggcgctcccggtcaaatctgccattgcccttgaatcaaaaatggcggatgtccggaaagtggtggatggtctggatacgccggaagcgtttaaggcaatgacggagcaggtgcgcgacctgtcaacagaactgcccatgtcggcggaaggtatcgccgaaattgtggcggcgggtggtcaggctggtatcgcccgtgacgagctgatgcagtttactgacgatgccgtgaagatgggcgtggcctttgacaccacggcagaagaatccggtcagatgatggcgcagtggcgcactgcctttaaactgacacagggagaggtggcagggcttgcggataagattaactatcttggtaataccggtcctgcaagtgcgaaaaagatttctgatgttgtgacccgtattggccctttaggcagtgttgcgggtgtggcctccggagagattgccgcaatgggggcaaccattgccggaatgggggtggagtcagaaattgctgcgacggggataaagaattttatgttgtcgctgacagcgagggattctgccaccaaatcgcagaaaaaagtgctccgctcgttgcgcattagcccgaaaaaactggcggcggatatgcagaaagacgcccgcggggccatgctgcacgtactggattctctggcaaaagtgccgaaagaaaaacaggctgctgtgctgaaagcgctgttcgggaaggaatccctgggggccattgcgccgctgctcacgaatctggatttgttgcgaaccaactttaatcgtgtggcggatgcgcagcagtatggcggctcaatgcagaaagaatatgccgcccgtgccgcgacgacagaaaatcagttgttgctgctgcagaaccagatcaatgcgatttcttccacgctgggggaaaccttcctgccttcactcaatgaaggcataaaagagatgaagccttttctggaagaagtgcgcacgtttgtcagagaaaatcctgaggtcgtaaaaaccatcgcgaaaactggtgcggcattactgacgatgggcgtggcgattggcacattgacacgcataacaaaaatcatgggtagcgtgatgaatatgacgccggcaaagggattaattgcgcttctcgtcggtggtgcatatctcataattgataactgggaaacggtcggtccggttgtgaaaaaagtctggcaggaggttgatcaggttgtcagagcaatggggggatgggaacaggcagtaaaaacaatagcaacggtttctgccctgtatattggtgtgaaggcggtggcaagtattcgtgcggcaacagtcgcccagaatcaatggacaacggcggcaggaaaaacagggctgaaattaaagggcctcggaaagatcagtctgattggtggattgcttgaactgggcatgatggcgcaggagtttgaaaaagcacatccctggcttgttaaaaattttgtggctgatgcactgaacagtggatttggtctgaatgataagttcgacgagtggggcaaacagttccatgattttgtctatgacatgaccggatggcagatgccacgtggtgatgggtatttatctcccgataaacgctacaccccgaatgtatcactggaaaggaatcagctgttaagccttgcatcttcaccggcaacccgcagcgaacttaaggtgacgtttgacaacgcgccgcctggaatgcgcgttatcgatttgccgaaaacaggcgatccctttatgaaaatcacccatgatgttgggtattctccatttaaaaggtgagttctttttttgtggtgaaagatgaggcaaaattatcgcgtaacatgctaacaatggagtttgttttgtgataaagccatttttaatgacggttgcaatattaacctcttgctgtgctcaggcgaaaatactaacaaatgaggagattgtttcacgatttattagtaacgttaaaacggtgatgctgccaacttactgatttagtgtatgatggtgtttttgaggtgctccagtggcttctgtttctatcagctgtccctcctgttcagctactgacggggtggtgcgtaacggcaaaagcactgccggacatcagcgctatctctgctctcactgccgtaaaacatggcaactgcagttcacttacaccgcttctcaacccggtacgcaccagaaaatcattgatatggccatgaatggcgttggatgccgggcaactgcacgcattatgggcgttggcctcaacacgattttacgtcacttaaaaaactcaggccgcagtcggtaacctcgcgcatacagccgggcagtgacgtcatcgtctgcgcggaaatggacgaacagtggggctatgtcggggctaaatcgcgccagcgctggctgttttacgcgtatgacagtctccggaagacggttgttgcgcacgtattcggtgaacgcactatggcgacgctggggcgtcttatgagcctgctgtcaccctttgacgtggtgatatggatgacggatggctggccgctgtatgaatcccgcctgaagggaaagctgcacgtaatcagcaagcgatatacgcagcgaattgagcggcataacctgaatctgaggcagcacctggcacggctgggacggaagtcgctgtcgttctcaaaatcggtggagctgcatgacaaagtcatcgggcattatctgaacataaaacactatcaataagttggagtcattacccgttaaaacatctgcagataatgacgttgacttggatacagatggattcagacaactgaggatatcgtgcccatccccttctgccagcggtgcgattatattgagaaaagcttcttatgaattcggcaaaagtataggtgtatttgattttgcaaacaatgcatcaccagcgacgatgacatttttgatcccaatatataaagatgatgattttgattcagatactgttggttttacatttgcgttcaagatgccaagaggccagttttttgtagatgtaaaagaaaacgggaatatcagagctggagttaatgttaatggcgagtcgggagtgacctacgaaaattgcaaattgaatatgaaagatattaatgatgattaatatataagccgccagaaattggcggtttttttatagtggagacagtatggacttaccttctttaccttctctttcttcactcttttctgcatcttcaggtatcaattggcgcgataatctttacgacgcttcatttcgtggcgttccgttttcggtggagagcgacgagggttcgttcggacgccgcgttcaggtccatgaatacccaaaccgtgacaaaccgtacacggaagatctcgggcgtgccacgcgacggctgacgattaatgcgtatctcgttggtgatgattacgcagagcagcgcgacaggctgattacagcgattgaaaccgccgggccggggacgctgatccatccgcagttcggtgaaatgcagggctgtattgacgggcaggtgaccgtttctcactccggcactgaaggccgtatgtgccgggtttcatttcagtttgttgagagcggggaactgtcatttccggtcgccggagctgcaaccgccagaaaactggaggagtcgtccgtattcctggatgagttgattgaagacatgttcggcgattttgatctcgcgggaataccggactttattcagaacgatgttattgcccggacgaccgatatgctgggaaccgttcagacagctttcaaaatggttaattcggctgtttctgccggagcgagactactgcagggcgatttatccgtcattctgatgccgccgtcggttgccagtgattttgtgcatacgttgcaggatacctggcgggccggaacccggctggtggataacacacaggatctggtgcagtccataacgacaatgtccggcattacgctggacccaggactggcaccgcgtgcggtgtggcccacagattccgcatcggttatcaggcaaaaacagcagacaaaccttgtggctgctgtcatccggacgacggcaatcagcgaagccacaagggcggtcacttcactgccacaacccggaagcctggtgaaaaatcagcaggcggttgtggctgttggtggttccactgaacgtcagtccgatattattcacgtttctcatccggcacttgacagcgtggcagccagcacaggacaggatgagagagcgcaaccacccacgcgggaaaatctcaccatcatacgcgaatcgctgaacgcggcgattgaacaggagctcaggcgtacggcggatgacaggctgttttttcagctgacgtcattacgtacagaactgaaccgggatattcaggcgcgtctggttcagacggaggaaaccgcagagcgaacgccagcggaagttctgcctgcgcttgttctggctgcgtcatggtacgacgatgcgtcccgtgaaactgatatcctggatcgaaatgccatctctcatccgggctttgttccggtcagggcattaagggtacccgtcagatgaatgataccgttttacttcgggtttccggtcgcgaatggggcggctggacatccgtccgtatcagtgcgggcattaaccgtattgcccgggattttaatgttgccattaccacccgctggcccggaagccgggattatcaaccccggataaaaaatggtgagctggttgaagtgcttatcggggatgagcctgtgctcaccggatatgtggaggcactaccgcttcgttatgacgccagcagcgtcagcatgggaattgtcgggcgaagcaaaacagccgatctggttgactgctctgctttgccactccagcagagcggaaaaaacctgctcagaatagtcagtgaactggctgcgccatttggcatcaccgttgttgatgctggcgtgccgcagacagcggtgattgatgcccagccggaacacggcgaaaccgttgccgattgtcttaaccggttactggggcaggttcagacgctggcttatgacgatgaatgcgggcgactggttctgggaaaacccggaacaggtaaagcggcgacggcgctggtgctgggagagaatattctttcctgtgacacggaaagaagcatcagagagcggttttctgaatatcaggtcagtgggcagcgcccgggcaacgacgatgattttggtgaggccaccattgccgcaatacgtcagaccattcaggacagtggcgtgacccgttatcgccctttgttgattcagcagtcaggcacagcaacgacagcaacctgtaaggcccgttgtgaatttgaagcgcgccaacgggctgcgcttacccgtgagacaacatatacggttcagggctggcggcagggcagtggcgcgttatggcgtccggggttatctgtcatcgttttcgacccgctgaataattttgataatgatgaactggtgatcgcagaagttacctataaccaggacgaccggggcacgacgactgaattacgggttggcccggcagatgcttatctccccgagcctgttaccgccaggaagaaaaaaatgttgaggaggatttctgatgaacgggttttctcttcgtaatctgatttcccgggctgtcatcacggcggtggattccgccagaaagtgtcagtctgtagggttgaaaatgatagccggagatcagaaacaacacgttgagcaccttgaaccttatggttttacatctgccgcacagaacggtgctgagggcgttgctttatttccggcgggcgatcgttctcatggtgtggttgtggtcgtggctgacagacgttaccggctgaaaggactgaaacgtggggaagtggcgctttatgacgatctgggacagtccgttgtcctgacccgttccggtattgtggtggacggggccgggaaggccataatttttaaaaacgcgcctaaagcgcgctttgaaatgccagtcgaatccaccgccgatattactgacaattgcgacagtggcggactcagcatgcagcaaatgcggcaggcctacaatgcccacaaacataccgaaaatggtgatggtggcgggatcactgacacgccggatcaaccgatgggctgaaaatcatgatgattaatgttaacgggcgacccgtgtcgaccggggcttcgatcgaccttctgacgcgtgctgtgattatttcgctttttacatggcggcgtgccgggcgtgatgatgcaccacggatatttggatggtggggggatacctggcctgcggttcagaatgatcgcacggggtcgcgtttgtatctgttgcgacgcagcaagctgacaaataaaaccccgcagcttgccagagattatgtccgtgaggcgctggcgtggatggtggaggatggtgttgcttcccgtcttgatattaacgctgtccggaccgggacagactcgctggcacttgccattaccatttaccagcgtgacggcaatattcacaacattatttttgatgatatctggagtgaactgaatggctgacagtcagttttatcgccccggcctcccgcaacttatttctatgatccggagcgatttattaacccgctttgagcaggatacgctgcttcgtcgtatggatgcggaagtgtatgcccgtgtacaggctgcagccgtacacacgttgtacgggtatatcgattatcttgccagaaatctgttaccggacgtgtgtgatgaagactggctgtaccggcacgccagaatcaaacgctgcccgcgaaaagaagcggtggcagcccggggatttgtgcgctgggatggcgtagaggggacgccggtattgccagcgggaacgcagatccagcgtgataatcaggtgacctttaccacgacggcgacggtgaccgcagccgatggtcttctccgggtgcctgttgtggcagacgaaccgggatcggcggggaatacggatgatggtattgccatgcaactgggaacacccgtcagtggtctgccgtccacagggtacgctgacaccattacagacggtgaagatattgaaaatctggaaatatggcgtgcccgcgttatggaacgttattactacattccacaggggggcgcaggtaatgactccaacttattgatagtgttttatgttcagataatgcccgatgactttgtcatgcagctccaccgattttgagaacgacagcgacttccgtcccagccgtgccaggtgctgcctcagattcaggttatgccgctcaattcgctgcgtatatcgcttgctgattacgtgcagctttcccttcaggcgggattcatacagcggccagccatccgtcatccatatcaccacgtcaaagggtgacagcaggctcataagacgccccagcgtcgccatagtgcgttcaccgaatacgtgcgcaacaaccgtcttccggagactgtcatacgcgtaaaacagccagcgctggcgcgatttagccccgacatagccccactgttcgtccatttccgcgcagacgatgacgtcactgcccggctgtatgcgcgaggttaccgactgcggcctgagttttttaagtgacgtaaaatcgtgttgaggccaacgcccataatgcgtgcagttgcccggcatccaacgccattcatggccatatcaatgattttctggtgcgtaccgggttgagaagcggtgtaagtgaactgcagttgccatgttttacggcagtgagagcagagatagcgctgatgtccggcagtgcttttgccgttacgcaccaccccgtcagtagctgaacaggagggacagctgatagaaacagaagccactggagcacctcaaaaacaccatcatacactaaatcagtaagttggcagcatcaccgggggcgcagaccctgattatgttatctgggcgaaagaagttcagggtattaaccgtgcatggactttcagacactggaaaggcactggaacggttggcgtgatggtggcgacaaacgatccggaacgcccggccccggatgaaagcgtgattaacgcagtcagggaccacatccttcctctggcacctgttgccggaagcggattgtatgtattcggtgccacagaaaaagtcatcccgatgacgattgcattatcgaaagacacaccgcagatcaggactgcaataaaagcagagctgaatgcactgatgttacgggatggtgtgccagaggggcgtatgtatctgtccagaatcagtgaggccatcagtttgtctgctggtgaagtggcccaccggttaatcgtcccttcatcggatattgacctgggggagaccgagcttccggtgctcggcgagatcacctggcaggcttatgacccggcaaggagtaaataatggattcgttacaggatgattatacaaagctgctgtacggactgatgccgccggggcctgcatggtcagataccgacggtgtacttgacggtctggcaccatcgcttgtgcgtgttcaccagcgggctgatgaactggtgattgaaatcgatcccggtcagtccacagagctgattgaacgttatgaagaattgtatggtttacctgattcctgttcccctgtcggaacccagacattacgccagcgtcagcaacgtcttgaagcaaaagccaatgtggctggtggcataaatgagcagttcttcctggatcagcttgaggcgctgggatataccggcgtaacgatcgaacagttccagcacttggatgcaagccccgatccggaatggggagatcgctggcgttatttctggcgtgtgacgttgccgatggatgccggtgctcagtggcagacatgcacggacgcctgcaacacaccgatccggacgtggggggatacggttgcggagtgcgtgattaataaattatgtccgtcacacaccgtcgttttattttcctatccagatgaggatgaagatgcacaggattgatacgctgactgcggtaaaagataagtttggtccgggtaagaacggatttactgacggaaatcttcgcacaggacgtcttgctacctggctgaacagtgccatgtggaatgccattcaggaggaaatctgtggtgtcattgagaaggccgggatagaactgaataaagaagaacacgaccagctatataaggctatattattgctggtgggcggtgcaattaacgaagaggcattgctgataaaaaataacctttcggatgtggaagacagggatgaggctgttgaaaacctcggattaaaacccacggtggataaggcaaaaaatgccgttcagcgtgatggcgacaccatgaccggagagctgaaaatccgtggtgttaatgcgctgaggattttcaacgaagcttttggcctgatttttcgtcgttcggaagagtgcctgcaccttattcccaccagtgaaggtcagggggaaaatggcgatattggtcccctgcgcccgttcaccattaatctgcggacgggtgaaatatccatgtcgcataaagtgtctgttggcggtggttcgcaggtcaatggtgcgctgggtatcggcgttcagaacgccctgggggggaattcaattgttcttggtgataatgacaccggattcaaacagaatggtgatggcctgctggatgtttatgccaatagcgtgcatgtgttgcgttttcagagtggcagtatccagagtaataaagctgtaaacgttacaggacgggtaacaccgtcagactacggaaactttgatgcccgttaccagcagcgaaatggtggcgtgcaggatgtgcggtatggttatgaaatgtattacacccccggcagtaacaccgtttcgtggacatttcgctcaccttcgggacacgggctgtcagggatatcgatatcggataccggccgtaactcagcggataacgtcaacggcgtgtattaccgaccgctgcaaaaactgattaatggcacctggtataacgtagcgagtatttaacaatgttgcatttaaaaaatattacggcaggtaatccgaaaaccgcggaataatatcagctgacaaaacagtatgatgtcacctggcttttttcggaagacggcaaaaactggtatgaagaacagaagaactttgccagtgacaccataaaaatggtttacaccggagacgggcgcgtggtgtgggtcggtaaggatgtgacaggcattgaaccccgtaacgccagtgttattgaagttcctgatattaccgccaaccgccgcattaccgcgccgggttactggttttaccgcaatgatgaatttgtctttgactacagactcaaagcggaagatgagcgtgatgcccttctggctcaggtcagtgcccggacaggggaatgggaagaagacctgctgctggggctaatcagcgacgaagaccgggaaaaactgaaagcgtaccgtatttacgcgaaatcgctgcaggcgatggatttcagcaccatcactgataaatcctcatataacgccattgaatggtccgtctctccggaaggttcttcctgatttaatttatcgcgagaaaaactatgtctgtagtgatatcaggtgcgctgactgatggcgcaggcatccccatgtccggatgccagattattctgaaatcccgtgtaaacacctcagaagtggtgatgcgtaccagggctgatgtagtgaccggaaataacggtgaatattcgtttgaggcacaggtcggaaaatattgcgtgtatctgaaacgggactggcgcgacgagtactgtgttggcgacattgctgtatacgacgactcaaagcccggcacgctgaatgactttctgattgctcctgatgagggcgacctgaaaccggatgtcgtcaaacgctttgaggaaatggtggcgcaggcgcagcagagcgccggggccgcagccggaaacgcacagcagacggcgcaggatgtggcggcagccgcaggttatgcccgcgcagcagagcaggccaaaaatgacattgatgctgcgctgaccggcactctgaaaacggctaaccatctgtctgaaatcgcagcagcaggcgaaaaggcacaacagaagtcccgggataatctggggctgaaaagtgcggccacgatggaagcacagagcgacatttacgaccggacaaaaggccgtctggcgatacccggcgcattcggctttgggtgtgcttttctgcctgaagatgttatccgttttgacactaagagtgatttcctggcctgggtaaggaatgcgctgccaggtgaatattccgttgctggcccctacgacatcatcatacccgacacacggtttgaaggggtgctcagcatccggtggactgatgcacgccctgagacaacagaaccgaggtacagagccaaatcccttactttttacggcattaacggccccatttatcacacccgctactgctactggcccatatccagactgactggctgggtgaaaataaatataaccacagaagatattatttacagaatcgtggcgagctctgtctgcaacagatggggagaccctgacattggcgggctgattattgctgcgtaccagggagaagctgacggtgataaagtcatcagacttgtcagggggcagtcatacagaggctcacgactgggaccggtggggatttcagtgcccagtactcccaccggaacgtatatagcatccccacaatttttcattacgggatgttcagagcattcattaccggggtcatatagcgccctgtccggggtgccggatgctcatgtctctggcgcaatgcccgggctttttattcgcacatcgtgaggaatgcaccgtggaaattaaaaaaatcattaatccccgttataccgaaagtggcgcagtagactgtgacgttttttttgacgacagggacctggcagtcccctacacagccaccgctgatgatgtcgcaccgacgggtcagcaaatctggcaggaactgcaaagtggcaaatggggtgagatagccccattcactgtgacaccagaaatgctggaagcggccagagaggccagacgtcaggaaattgaagcatggcgcacagaacaggaggcgaagccgttcacgtttgaatggaatggtcgtatctggaatgctggccccgactcactgggccgcctgtccccggtagtcatgctggcaaaatctgtcacagcacaaacgcatatggcgtggggtgatgccgataatcagcaggtgaaactgtcgatgccggaactggaagaactggcggcagcaatggtgcaggcgcaggtcgatcgcaacgatgagatttatcgccgtcagcgtgaaatgaaagaggagctgagtggtctggaggatttgggaacaattagagcgtttgatgttacgtaattggtaagctgcatcgtgttaaattgttacccttatttacaactagaaaagcctctgacttcataatcagaggcttttttgaaatgcacgtgcattttgcgtgtatatttttgtctttttctggtccgcttactgtctggtcagtgtccgtaagtgactgtttttatagtctctgtccggttgcagtcctgtcaaaagtggtggagctggcgggagttgaacccgcgtccgaaattcctacatcctcggtactacatgcttagtcagtctttacattcgcttgccagctgcggacggacacgccactaacaaactagcctgattaagttttaacgcttcaaccccaggcagggcttccacgcgatctcttttgggtttgacctctcttgatccccgtcctaagagcggaggctagggagagagggctctaagcaggttattaagctgctaaagcgtagttttcgtcgtttgcgactattttttgcggctttttacgaggccaaccgcccctcggcatgcaccttgggtttcgcaaatcccgtcgaatccagaatcagccccaatgtgtaaaggtaagtataccagatttatgagcgccatgaccagcctcaatggcgttatcgttaaagatttagcacccatgtagcctgatttttattcgattaagcaatgggatggcaacatttgtgtcggatgtgatagccaataagatgttcattcgcgccgccggagagggaggcgcggtgaggaactggtcaataattggagtgcaggtttaacggtgggcgtttttcatgatacgtgctttatccacctgccattcgcgttctttgatatctgaacgtttatcgtgctgttttttacctttggcgacgccgattttcactttgcaccaggcatttttccagtacagggagagcgccactacggtatagccttctcgattgacgcgaccgtacaatgagtccagttcgcgctggttgagaagtaacttgcgggtacgggtaggatcgcacaccacatgcgtggaggccacggccattggcgtgatgttagcgccaaacagaaatgcctctccgtcacgcagaaggacgtagctgtcgctgatattggcttttcctgcgcgcagggatttaacttcccagccttgcagggcaagtcccgcttcgaactcttcttcgataaagtattcgtgacgggcgcgcttgttaagcgcgatggtcgctgaaccaggtttatgtgcttttttcttcgtcataagcgtcgtgaatcatcggtaatctgaaatcgaaaacaccccatatcaatcctgcgggggacaaggctctatcttagcatgaacccgatgttacccagcgccgggatagcgttttttttacagcaggataaatgatattatttgttggatttttgttgatggaaatagttatgcctcagattagccggaccgcactggtaccctacagcgcggagcaaatgtatcagttagtgaatgacgttcagtcttatcctcagtttttgccgggttgtaccggaagtcggattctggagtccactcctgggcagatgactgcggcggtagatgtctctaaggctgggatcagcaaaacgtttactacccgcaaccagttgaccagtaaccaaagtattcttatgaatctggtggatgggccgttcaagaaattgattggtggatggaagtttacgccgctgagccaggaggcgtgtcgtatcgagtttcatctcgactttgagtttaccaataagttgattgaactcgcctttggtcgcgtgtttaaagagctggcgtctaatatggtccaggcttttacggttcgtgcgaaagaggtttacagtgctaggtaaaattgccgttgaggtggcttatgcgctacctgagaagcagtacctgcagcgcgtgacgctgcaggagggcgcgacggttgaagaagctattcgcgccagtggcttgctggaattgcgtaccgatatcgatttaactaaaaacaaagtcggcatttacagccgtccggcaaaactaagcgatagtgtgcatgatggcgatcgggtggagatttatcgccctctcattgccgatccgaaagagcttcgcaggcaacgagcagaaaaatcagcgaataaataacagacagaaaaaaggtgctcattgagctaatgccgatcagttaaggatcagttgaccgatccagtggctgtgtaagaatccggaaacgctcacttgtttccggatttttttatgcacattggacaggctcttgatctggtatcccgttacgattctctgcgtaacccactgacttctctgggggattacctcgaccccgaactcatctctcgttgccttgccgaatcaggtactgtaacgctacgcaagcgccgtcttcccctcgaaatgatggtctggtgtattgttggcatggcgcttgagcgtaaagaacctcttcaccagattgtgaatcgcctggacatcatgctgccgggcaatcgccccttcgttgcccccagtgccgttattcaggcccgccagcgcctgggaagtgaggctgtccgccgcgtgttcacgaaaacagcgcagctctggcataacgccacgccgcatccgcactggtgcggcctgaccctgctggccatcgatggtgtgttctggcgcacaccggatacaccagagaacgatgcagccttcccccgccagacacatgccgggaacccggcgctctacccgcaggtcaaaatggtctgccagatggaactgaccagccatctgctgacggctgcagccttcggcacgatgaagaacagcgaaaatgagcttgctgagcaacttatagaacaaaccggcgataacactctgacgttaatggataaaggttattactcactgggactgttaaatgcctggagcctggcgggagaacaccgccactggatgatacctctcagaaagggagcgcaatatgaagagctcagaaaactgggtaaaggcgatcatctggtgaagctgaaaaccagcccgcaggcacgaaaaaagtggccgggactgggaaatgaagtgacagcccgcctgctgaccgtgacgcgcaaaggaaaagtctgccatctgctgacgtcgatgacggacgccatgcgcttccccggaggagaaatggcggatctgtacagtcatcgctgggaaatcgaactgggatacagggagataaaacagacgatgcaactgagcaggctgacgctgagaagtaaaaagccggagcttgtggagcaagagctgtggggtgtcttactggcttataatctggtgagatatcagatgattaaaatggcggaacatctgaaaggttactggccgaatcaactgagtttctcagaatcatgcggaatggtgatgagaatgctgatgacattgcagggcgcttcaccgggacgtataccggagctgatgcgcgatcttgcaagtatgggacaacttgtgaaattaccgacgagaagggaaagggccttcccgagagtggtaaaggagaggccctggaaataccccacagccccgaaaaagagccagtcagttgcttaactgactggcattagctcattgagcaccttttttaacgtctttgagagcaactttattattagttaccactcagcgcaggtttgttatcaatattggtcaacacaccgctactgttaaaggtcagcgtcagcgtttgctgcgttacaccttcatgacctggttgctggcggaagacatagaaccaggtattcgtaccaaatggatcggacatcagcggtgtacccaatgcgtacgcaacttgttgttgcgtcatgccaacacgtattttggatacgtcgttagcggtcagatagttcccctggttgatgtcaggacggtaaaccactcgctccagagtggaacagcctgcggtcaacatcaatagtactgctgctgcagcagtcagcgttttacagcgcatagtgatttgattccttttcgggcccgagcagtacgtggctcatctgtaatatgccgatgataatagacctttcatcactttaaaaccttttgctttccggtcttacggcgttttgctgtttactctaaccgtgaagcaggaaaaaagtttacgctgcaagcagttctttcgcattcgctagtgtattacgtgtgacttcactgccaccaagcaggcgcgccagctcttgtaaccgcgcttttttattcagggattgcatatgcgtttctgtcatcgcaccatcggtttctttgctgacaaaatagtgttgatgaccacatcccgcgacttgtggcaggtgggtaacacacatcacctgagttgattcgccgagttgacgcagcagtttgccgacaactgccgctgttggaccgctaatccctacatccacttcatcaaaaatcagtgccggggtttccattttacgcgccgtgatgacctggattgccagtgcgatgcgggacaattcaccaccggatgcgactttggcaataggctgcattggctgacctgggttggtggttacccgaaactcaatacgatcggcaccgtcagcgcccaggtgatgctcgtcaaatttaacatcgatcgtaaactgcccatgcggcattgagagcgcatgcatactgtcggtgatcagctgtgcaagttcttctgcatattgctggcgttgttggtgtaatgcgcgcgcgatttccagtgcctgctgatgatgtttcgttaccgccagcgcaagcgtttcttgtgagtcggcctgatcgtccagttgctgctgttcttccagtagcgactggtaatactgtggcaatgcctcagggctgacgtgatgtttacgtgccagcgaaatctgttttgagatgcgctgttcaagttcaaatagtcggttgggatcgagatccagacgatcgcagtagtggcgcagttcatcgctggcttcagcaatctggatggtagcttcttccagcatatcaagtacgccggacagtttgctgtccatgccaatcaattcgctcaccagttgtttagccgtgtaaagctgactttgcaggtttgcgtcttcaccgtcggccattaatgccaatgcattctggctggtggtcagcaattgaccgctgttcgccagacgtttgtactcttcgtcgatttgttcaaactctccgggctgcggattaaattcgttaagttcttttaattggtattgcagcagttccgcacgggcggcgcgttcctgacttaactgttgatgatgcgcgaggtcacggcagctttgatgccacaactgataacgtgcggtcatttcctgcagtagagaggtttcattggcatagccatcaagcaggaatttttggtgctcaggtttggtgagtaattgatgagcgtgctgaccatggatctgaatcagcaactgacccagttcgcgcagttgtgacagaggaacagctgtaccgttgatgaaaccacgggagcgaccatcgctgctgatcacgcgacgaagcaaacattcatgcccgtcttcaagctggttttcttccagccagcgcagagccgctggcgtatctttcagagaaaaacgggcgcacaggtcagcgcgagcagcgccggtacgcaccatgtcggcttcagcgcgaccaccgagacaaagaccgagggcatctattgcaatagatttacccgcgccggtctcgccagttattacggtcatgccgctatgaaaatcaatctcaagctcacgaacgatagcaaagttgctgatggtcagttgtgccaacatagtcgttttcctgtatgaaaaaccattactgttattgtgtacagtataaactggttttatatacagtaaagaggctggcgtaaaattagaataatttttttgaccagccgagcttggtgcttaatgtgttgaaataactgtaatctttcggatgaatcagattcagatggtaatcacagcgacgaatcaggacatcttcaccttcctgaatcggcagtgctatctggctgtcgcaactgatttccaggtcgttacggcgatgcgaaaaacgcagacggatcgtgctgctgctgtttatgaccagtggtcgtgctgacaacgtatgcgggaacatgggcaccagggtaatcgcatccagagagggggtcagaataggaccgcctgcagagagggaataggcggtggagcctgttggcgtcgaaataattagtccatcagatcgctgagaaaacgcaaagatctcgtcgatatacacttcgaactcaatcatatgcgccactttgcctggatgaagcaccacttcatttatcgcggtgctgatgcgtttctggcaatcttgctgacagacttgcgcttccagcaaaaaacgtttctcgctgatgtagtggccttccagcacatcggctaactgttgctgggcgttatcggggtcaaggtcagtcaggaaacccaggttgccacggttgattccaataactttaatatcgtaacgggcgagtgtgcgtgccgcgcccagcatattaccgtcgccaccaacgactaccgcgagatcagctagttgcccaatctccgcgagcgtgccagttttcacattcttcagttgcagttcgtgagcgatttgttgctcaacgatgacctcgtaaccttttgtgcacagccagcggtagagcatttcatgtgttgtcagtgcagtggggtgccgtgggtgtcccacaatgccaatacacttgaaatgattattcatttttccgaggtccttgttgcgaagattgatgacaatgtgagtgcttcccttgaaaccctgaaactgatccccataataagcgaagttagcgagatgaatgcgaaaaaaacgcggagaaattcatgagtagtaaagaacagaaaacgcctgaggggcaagccccggaagaaattatcatggatcagcacgaagagattgaggcagttgagccagaagcttctgctgagcaggtggatccgcgcgatgaaaaaattgcgaatctcgaagctcagctggctgaagcccagacccgtgaacgtgacggcattttgcgtgtaaaagccgaaatggaaaacctgcgtcgacgtactgaactggatattgaaaaagcccacaaattcgcgctggagaaattcatcaacgaattgctgccggtgattgatagcctggatcgtgcgctggaagtggctgataaagctaacccggatatgtctgcgatggttgaaggcattgagctgacgctgaagtcgatgctggatgttgtgcgtaagtttggtgttgaagtgatcgccgaaactaacgtgccgctggacccgaatgtgcatcaggctatcgcaatggtggaatctgatgacgttgcgccaggtaacgtactgggcattatgcagaagggttatacgctgaatggtcgtacgattcgtgcggcgatggtaactgtagcgaaagcaaaagcgtaatttctgttttcgtaataattcacggccctgcatgcgaatgcagggccgttttcgttactccgccacactctcgcgcagcggtttcacaggaaaaacttttacctgcttaatcatattgtcctgtacgtcgagaatatctatatcgtactcgccaatacgcacgcgggtgcctgcgacagggatctcttccagtgcctcaagaatgacgccattaaccgtgcgggcatcatcttccggtagatgccaattaaaggctttgttgatttcccgcacgttggcggtgccatcgataatcaccgaaccgtcgttttgcggcgtgacctcttcggcaagtgttggcgacatcgacgtagtgaaatcgccgacaatctcttccagaatatcttcaaccgtcaccagcccctgaatgtctccatactcgttgacgaccaggccgactttctttttgttgcgctgaaactttaccaactgcgtgctgagcggcgtaccttccggcacaaaatagatctcgtccgcggcgcgcagcatggtttctttggtgaactcttttttctccgacatcaaccgccaggcttcacgtactcgcagcatactgatggcgtcgtccagcgaatcacggtagagcacgatgcgcccgtgaggtgagtgggagagttggcgcagaatcgatttccagtcatcgttgatatcaataccgataatttcactgcgcggcaccatgatgtcatcaacggtcattttttccagatcgagcaccgacagcagcatatcctgattgcgacgggaaatttgtgagcgtgattcgtgcacgatagtgcgcaactcttctttgctcaaagagccgctaaccacgatatcggttttgatacccatcatgcgcatcagcatacgggtgatagcattcagcaaccagaccagcggcatcatcaaaatttgcagcggagccagcagaaaactactcggataagcgactttttccgggtacagcgcggcaatggttttcggcaatacctcagcaaataccagtacgacaaaagtcagcacaccagtcgcaattgccacgcccgcatcgccgtacaaacgcatcccaacaatagtgccgagcgcggaggcaagaatattgaccaggttattgccgattaacaccaggcttatcaggcggtctggcttacgcagcaatttttcgacgcgtttggccgagcgattaccctgtttcgccatatgtcgcagacgatagcggttgagggtcatcattccggtttcggacccggaaaaataggctgaaatgaccaccatgatgatcagaataatgatcaacgtagtagtagaaatgtgttccaggggaaactccttttctgggtttagctgattaactgctggacaattcggctgccgaagtaggccagtgtcagaattaccgcgcccgcaacgttaaaccagacgacgcggcgtccacgccatccttcatggtaatgtccccacagcagcacaatatagacaaaccacgccacgatagagagcacagccttgtcgatattttccatgctaaataggttgtgcatgtagaacaggccagtgcaaagcgtgagcgttagcagcaccacgccaatctgcgtgatgtggaacattttacgctcgatactcatcaatggcggcatttcctggttaaatgccagcttcttgttcttcagttggtaatcaatccacgccagttgcagcgcgtacagggcggcgataattagcgtggcataggaaaagagcgataagccaatgtgcaccagcatcccaggcgttgcttccagatgggtgatgtattcattgggcatgaaggtcgccagcgccaggttgataagcgcaaaggcatagacaatgggtagcagcaaccagccacgattgcgagaagccacaatggtcattaccgtacagatcatcaaactgaccaatgaaccaacgttcagcaggctgaggttttgtccgctatcaccgtcgggcaggatgcgggcttccagagcgattgcgtggcagaccagcgcaatgaccgcagaaataatagccatgcgccgccagccgccgtttttttgcagcagaccgggaacaatcagcgcaagactgacggagtaggcgacaagcgcgagcagagcaaaaacgggcatagtgatgtcgacagtttgagcaataagaaagagaagcagtatagcgtcaggtgaacgctgctccaaccgttgcataacaacaaagacgccttcatgttatactgcggcaaaatactgatgatgtgtcgcgattgcggccaaccgtttccaccccaggcgagagacaatgtttgataatttaaccgatcgtttgtcgcgcacgctgcgcaatatcagtggccgtggacgcctcactgaagacaacgtaaaagatacgctgcgcgaagtgcgcatggcgctgctggaggcggatgtcgctctgccggtagtgcgtgagtttatcaatcgcgtaaaagagaaagcggttggtcatgaagttaataagagcctgacgccggggcaggagttcgtcaaaatcgtccgtaacgaactggttgcggcgatgggcgaagagaaccagaccctgaacctggcggcgcaaccgcctgcggtcgtgctgatggcgggcctgcaaggtgccggtaaaacaaccagcgttggtaaactcggtaagttcctgcgcgagaagcacaagaagaaagtgctggtggtttctgccgacgtttatcgcccggcggcaatcaaacagcttgagacgctggcagagcaggtgggcgttgatttcttcccttctgatgttggtcagaagccggtagatatcgttaacgcggcgctgaaagaagccaaactgaaattctacgacgtgctgctggtggataccgctggtcgtctgcacgttgacgaagcgatgatggacgagatcaaacaagtccatgcgtcgattaacccggttgaaaccctgtttgtggttgacgccatgaccggtcaggatgcggccaatacggcaaaagcattcaatgaagcgttaccgcttaccggcgtagtgttgaccaaagtggacggcgatgcccgcggcggtgcggcgctctctattcgtcacatcactggcaaaccgatcaagtttctcggtgttggcgagaaaactgaggcgctggagccgttccatccggaccgcatcgcgtcgcgtattctcggcatgggcgacgtactgtcgctgatcgaagatatcgaaagcaaagttgaccgcgcgcaggcagagaaattagccagcaagctgaaaaaaggcgacggcttcgatctcaacgattttcttgagcagctgcgccagatgaaaaatatgggcggcatggctagcctgatgggcaagctgccgggcatggggcagatcccggataatgttaagtcgcagatggacgataaagtgctggtgcgtatggaagccatcatcaactcgatgacgatgaaagagcgcgctaagccagaaattatcaaaggttcgcgtaagcgtcgtatcgctgccggttgcggtatgcaggtgcaggacgttaaccgccttctgaagcagttcgacgacatgcagcgcatgatgaagaaaatgaagaagggcggaatggcgaagatgatgagaagcatgaagggtatgatgcccccaggcttccctggtcgctaatcggcctggcttgtttgccattttggcaccgggatgtgctcgtcatcctcacgtactgcgtgtacgctccggtgactgcgcgcactccggcaccaaactggctgcaccgccgacggccttttacagcagagttagcaactgttgattgcaattcccgcaaaaatgagtaaaattttcgggcttttaatatgacaccggactccgttcctcgatggggtccggttgttttattcacacaagaggatgttatggtaactattcgtttagcacgtcacggcgctaaaaagcgtccgttctaccaggttgttgtcgctgacagccgtaatgcacgcaacggtcgcttcatcgagcgcgttggtttcttcaacccaatcgctagcgaaaaagaagaaggcactcgcctggatctggatcgcatcgctcactgggttggccagggcgcaactatttctgatcgcgttgctgcgctgatcaaagaagtaaacaaagcagcttaatctgtcacggtggtcatgatgagcaaacaactcaccgcgcaagcacctgttgatcccatcgttttgggaaaaatgggttcgtcttacggtattcgtgggtggctcagagtgttttcttccaccgaagacgccgaaagcatttttgactatcagccctggtttatccagaaggcgggtcagtggcagcaagtccagctggaaagctggaagcaccacaatcaggacatgatcatcaagctgaaaggcgttgacgatcgtgatgcggcgaacctgctgacgaattgtgaaattgtcgtggattcatcgcagctgcctcagcttgaagagggggactactactggaaagacctgatgggctgccaggtagtaaccactgaaggctacgatctcggtaaagtcgtcgatatgatggaaaccggatctaatgacgttctcgtcattaaggcaaacctgaaagatgcgtttggtatcaaggaacgtctcgtaccgttcctcgatgggcaggttatcaagaaagtcgatctcactactcgttcaatcgaagtagattgggatcctggtttttaaaccaccggataaacggtaaaagacggcgctatgtggattggcataattagcctgtttcctgaaatgttccgcgcaattaccgattacggggtaactggccgggcagttaaaaatggcctgctgagcatccagagttggagtcctcgcgacttcacgcatgaccggcaccgtaccgtggacgatcgtccttacggcggcggaccggggatgttaatgatggtgcaacccttgcgggacgccattcatgcagcaaaagccgcggcgggtgaaggcgcaaaggtgatttatctgtcaccacagggacgcaagcttgatcaagcgggcgtcagcgaactggcaacgaatcaaaaattgattctggtgtgcggtcgctacgaaggtatagatgagcgcgtgatccaaaccgaaattgacgaagaatggtcaatcggcgattacgttctcagtggtggtgagttaccagcaatgacgctgattgactccgtttcccggtttattccgggagtactgggacatgaagcctcggcaacggaagattcctttgctgaaggattgctggattgcccgcactatacgcggcctgaggtgttagaagggatggaagttccgccagtgttactgtcgggcaaccatgccgagatacgtcgctggcgtttgaaacagtcgctgggccgtacctggcttagaagacctgaacttctggaaaacctggctctgactgaagagcaagcaaggttgctggcggagttcaaaacggaacacgcacaacagcaacataaacatgatgggatggcgtaagcccccgagatatcagtttacccaggataagagattaaattatgagcaatattattaagcaacttgaacaagagcagatgaagcaggacgtaccttccttccgtccgggtgataccgtggaagtgaaagtatgggttgttgaaggttccaaaaaacgtctgcaggcattcgagggcgtggttatcgctattcgtaaccgcggtctgcactctgcattcactgttcgtaaaatttccaacggcgaaggcgttgagcgtgtcttccagactcactctccggtagttgacagcatttctgtcaaacgtcgtggtgctgttcgtaaagctaaactgtactacctgcgtgagcgtactggtaaggctgctcgtatcaaagagcgtcttaactaagatttcgcttaagcgacatcctgttaagaagggctggccaattggctggccctttttttgtctgtttgctcgtgttttaaggggttgtaatcaccactgcgacgcggcggttctcggcgcggccctgggcggtcttgttactggctatgggatatttttttcctaaaccctgtgtggtgagattgctgcgtggaatttgtccaccaatagcccatgcatcggccacgacattcgcccgtttcaatgataagccttcgttgtaactgtcttcaccatagttatcggtgtgtccatccatacgggcatgtgttagccctgtcgaggccaatttggctgccatggtttggatctgttgctggctttccgggagcaatttgtagtcattttttgcgaacagaatggcatctgataagcccagcgaccagtcgccggcggattcagtaaatccataagattgcatagcggcgacttgctcaggagtaaactttccctgaggggactggcagccagtcagtattagtgaggtgaaaatcaggggtgctaccaggtgctttatcatatcgatatatccttgttatctcaccagcttttcggcacgctggtgtttggcctgatacatattgtgatcggcaagctcttgtaatttttccgcagaggcgtgctcaatggtcatcgcgtaaccaatgcttaatgtcatggtggtctgatggccattatgaagatcaaacgggagattaaagatttgtgtcagtgctgagcatatctgctgcacttcagattctgactgtacatcatagagcaccatagcgaattcatcgccgcccaggcggtatgctttatgtcgcagcccgccaacttcagctaaccgttttgcgatttcaatcaagactctatcgcccgtcgcatgaccccaggtatcattgatgtatttgaaattatcgccatcaagaaatagtaacgccgacgtttttcgggcatcggaattgttcatcaacgtgttgatgccgctacgaaacgctgcgcggttagccagcccggttaatgggtcatgtagcgcggtacgtagaagctgcgcatttttagcctgtaaacgaagctgccactcttccatttcatccagcagactgttgaagtcgagagcgaagcggtgaaactcagcgatacgttcttccgaaactcgtcgggaaaaattgcggttggaacgcacatcatgtacgacatcggtgatatttttcagtgcttccaccaggccattgtgcaaatggcgggtgagggtaattgcgatgcctgatgccagcagaatacaaccggtcagtacggcgagcgaaaaccagataaaatggctgattgaactgtcgcgagcggttaagcgtacttcgccaatggtttcaccattgtgacgaatcggctgaatgatgggggcggggaagagccagtggcttatgaaattgctgaaagtatcgcctggatccttacgggtgtaatgccaggacgccagaatattttgctgcttatcacgtacttctgcagttgaaaattgcccttgctggcccagcgctgccagtgtttcagttgctgcagggccatcggcaaaaacgacagctgcttccagactgtaagtcattgtgtcaacgccacgatgtttgaccgttatttgccattttcatgcccgctaaatactttcgttactgatgctgtccgctttccaccatttcatcatcactgattggcgttgtgtttttggtcagcactccagctttacgtttctcttttaaccggtaactctctcctttgatattcagcgtggttgagtgatgtagcagccgatccaggatcgctgttgccagtacgtgatctccgaacatttctccccagtctgcgaaccctttgtttgacgtcagtatgatgctcgctttttcatatcgacggttcagtagccggaagaacagactggcttcctctctgttcatcggcagatagcctatttcatccaggatcaacacccgggcataactcagttgctgtagctgacgctccagccggttttcctgtttcgctttcatcagtgtcgcgatcagtctgtccagtggcataaacagtacccgatgtcccgcatccaccgctttcacgccaagagctatggccagatgagtttttccgacaccaggagggcccagcaggatcacgttttcgctgcgctccacgaacgccagaccagccagttcccggacaaccttacggtcgatgcccggctggaaggtaaagtcgaactgctccagcgttttgacccacggcagacgagcctgcttcagcctggactccataccgcgctgatgcctgccgttccattcctgctgtagcgccatgcacaggaactcccggtagttcagctcttttttagctgcctgttccagcaggctttcaacgtgataactcagatgctccattttcaggcgactcagcaggacttccagttcatgcatcacaacagctcctcataggcactcagtggtcgatgttccacctgactgacctgctgccagagcggggcgtgatgctccggcactgtctgccagccagacgatgctgaacagaggcgatgtgaggccaccagtttctcattactgtagatccgcaactcgtcatccagcgatattcgtatcgataccggctgaccacacagcgcttcgggaacgctgtaacgattaccaccaacctcgatatagctgtcccaggacacatggcggatatcgaagtaactggtatcgaagtctgtatccggtaacggctgcagatgttcctgctccagcgcgaagcgctgttccggcgtttctttgaactggcgaagctcccgtttgtcagccacatcggctatccattgctccagttgttgattgacatgagtgaagctgtcgaacctgcggtaccggacgaagaagttctccttgaggtatttcaccatccgctcaaccttaccttttgttctggccctgcgtggacggcatgcccgtggcaggaagttatagtggtcagccagcaacaggaatccggagttgaacacgactttcccgttgttattcttcagcaccgcagccttctggttatcaaccagcaccgttttcacacaaccaccgaagtagcggaaggcgcgaaccagtgattcgtaggtatgctcagcatcctgttttggtgcggcgaagacatggaagctgcgggagaaccccagcgtattaaccgcaaagttaactttgcaccgttgcccggcaacctccacctcaacttcgccccagtcatgctggagctggtatccaggctgagtttcgaagcgaactgttctttttgacggacgcattttacgtttgggctggatgtagtaacgcagcatggaacgtccgcccgtataacccattgccttaatctccgcgaagataacctcgctattccagacattctctgccaggcgcatgtcgatgtaatccataaacggtttcagcttaaccattttgtggcgggtctttctggctggcggttcagggtatttgaggtagcgtctgaccgtccgttcagagcaaccaatctgagtcgcaatatcgacgatgtacgcgccctgctggcgcatttgctttatcatgtaaaagtcctctctgctcagcatgttgatgtcctttctggtgtgagaaccttaaggaaacaacatgttgggtggagcggacaatccaaatggcgaattaccgtcttatatcactggcgctgacaattgttgctgctgtcagtgccaggtttttttgcgcgtactgtttcagggtcagcaccgaggtcacggaaagcagcaaccagatcagcatcatagtgataaatatgctggtcatactgaggtagcctgagtttaacggacactccttcctgaaatagaatggcatcagaaggagctaataatgagcagaaaaacccaacgttactctaaagagttcaaagccgaagctgtcagaacggttcttgaaaatcaactttcgatcagtgaaggcgcttcccgattatctcttcctgaaggcactttaggacaatgggttaccgccgccagaaaagggctcggtactcctggttcccgcacggtggctgaactggaatctgaaattctgcaactgcgtaaggcgttaaatgaagctcgccttgagcgagatatattaaaaaaagcaacagcgtattttgcacaggagtcgctgaaaaatacgcgttaatcgaacaatggcgacaacaatttcccattgaagcgatgtgtcaggtatttggtgtatccaggagcggttattacaactgggtacagcatgaaccctcagacagaaaacaaagtgatgagcggctaaaactggagattaaggtggcacatatccgcactcgcgaaacatatggaacccggcggctccagacggagctggcagagaatggcatcatcgttggtcgtgaccgactggcacgtcttcgtaaggagctaaggctacgctgtaagcagaaacgcaagttcagagcgactacgaactcgaaccacaatctgccagttgcgccaaatctgctgaaccagacgttcgctcctacagcaccaaatcaggtctgggtggcggacctgacgtatgttgccacacaggagggatggttgtacctcgctggcatcaaagatgtttatacgtgcgaaattgtcggctacgccatgggagagcgcatgacaaaagagctgacaggtaaagccctgtttatggcgctcaggagccagcgcccacctgccgggctaatccaccactctgatcgaggttcacagtactgcgcatacgattaccgggtcatacaggagcagtttggtctgaaaacatcaatgtcgcgtaaaggtaactgttacgacaacgctccgatggaaagcttctggggaacgctgaaaaatgagagcctgagccactatcgttttaataaccgggatgaagccatctcagtaatacgggaatacattgagattttctacaatcgtcagcgtcgtcactctcgtctggggaatatctccccggcagccttcagggaaaaatatcatcagatggctgcttaaaaaaagaacaaatggtagtgtccgctattgccagtacacctcatactgatgttgcgtaatgctcttttaaacgtggggcgcttattaagagaattatcgttatccatcatttttcttccgtgcgagcattaagacatccgggttgacctttacaccgctacgcgataaggcatccaggtttacggcaaatctgacgtcattattgtggatgatcagacaaaaggcgctaccaataatgcactcggtattttgttcggcaattaataataacgcctttgacggatattgttcggttaattccatctggaatgtcggtgactcgttgccaaaataaaaaccattgcagcctgaaatcatcgcctcttgttgagtgtgaatgatgacaggcagataaggcaaagatgtcgcggcattctcttgtagggcggtactaaaacgtgaagatgaaaagatacataactttggtggccctgatagcgcaggccagcgggtgtaactgacaataccggaaaccatcatacgcacgtttttcgcaacgtcagaaggctcctgagcgagtattggtgctcccgtcagcaggagaatcagaagtaagaacagtcggtgagaaaaacgcattcagggatccccaccatcttcgctcgaaatgcatcgatattttttcagaatgctcattaaaatatcattttttcatgcgatcgtcatcaatgtgagaaataaaacacaatgagtaaaatcttatgtttaatttatttgtggggttttaattaatttaatcgtattgtgctggcattttcatcagcccctttttgccatacttcatgcagttggctggcactttcaacattgttacagctggcaggaaagcttttaccggaaagtccccgggcataagtaaaatcggtctggcaagttttcttttgtccttcggcatatcctttaaggtatagaccgcgatccgcctgtgaatcgctaaatgcatcgtcatcttttatggcgctgcccgatatcgcatcttccataccgacatcataccagtcggtgctggtcaaggttggcgcgtgagtataaggatcaatctgacatccgctaaccagtaaagccaataagggggcgataaactttttcatcatttctttctcctttttcaaagcatagcggattgtttttaaaggaggtgtaaatttatttgtacgaaataagcatcaaaagcgcgagcaaattgttcgtgtaaagaaaaatgtacgaaatatggattgaaaactttactttatgtgttatcgttacgtcatcctcgctgaggatcaactatcgcaaacgagcataaacaggatcgccatcatgcaaaaagacgcgctgaataacgtacatattaccgacgaacaggttttaatgactccggaacaactgaaggccgcttttccattgagcctgcaacaagaagcccagattgctgactcgcgtaaaaccatttcagatattatcgccgggcgcgatcctcgtctgctggtagtttgtggtccttgttccattcatgatccggaaactgctctggaatatgctcgtcgatttaaagcccttgccgcagaggtcagcgatagcctctatctggtaatgcgcgtctattttgaaaaaccccgtaccactgtcggctggaaagggttaattaacgatccccatatggatggctcttttgatgtagaagccgggctgcagatcgcgcgtaaattgctgcttgagctggtgaatatgggactgccactggcgacggaagcgttagatccgaatagcccgcaatacctgggcgatctgtttagctggtcagcaattggtgctcgtacaacggaatcgcaaactcaccgtgaaatggcctccgggctttccatgccggttggttttaaaaacggcaccgacggcagtctggcaacagcaattaacgctatgcgcgccgccgcccagccgcaccgttttgttggcattaaccaggcagggcaggttgcgttgctacaaactcaggggaatccggacgggcatgtcatcctgcgcggtggtaaagcgccgaactatagccctgcggatgttgcgcaatgtgaaaaagagatggaacaggcgggactgcgcccgtctctgatggtagattgcagccacggtaattccaataaagattatcgccgtcagcctgcggtggcagaatccgtggttgctcaaatcaaagatggcaatcgctcaattattggtctgatgatcgaaagtaatatccacgagggcaatcagtcttctgagcaaccgcgcagtgaaatgaaatacggtgtatccgtaaccgatgcctgcattagctgggaaatgaccgatgccttgctgcgtgaaattcatcaggatctgaacgggcagctgacggctcgcgtggcttaagaggtttattatggttgctgaattgaccgcattacgcgatcaaattgatgaagtcgataaagcgctgctgaatttattagcgaagcgtctggaactggttgctgaagtgggcgaggtgaaaagccgctttggactgcctatttatgttccggagcgcgaggcatctatgttggcctcgcgtcgtgcagaggcggaagctctgggtgtaccgccagatctgattgaggatgttttgcgtcgggtgatgcgtgaatcttactccagtgaaaacgacaaaggatttaaaacactttgtccgtcactgcgtccggtggttatcgtcggcggtggcggtcagatgggacgcctgttcgagaagatgctgacactctcgggttatcaggtgcggattctggagcaacatgactgggatcgagcggctgatattgttgccgatgccggaatggtgattgttagtgtgccaatccacgttactgagcaagttatcggcaaattaccgcctttaccgaaagattgtattctggttgatctggcatcagtgaaaaatggaccattacaggccatgctggcggcgcacgatggcccggtactggggttacacccgatgttcggcccggacagcggtagcctggcaaagcaagttgtggtctggtgtgatggacgtaagccggaagcataccaatggtttctggagcaaattcaggtctggggcgctcggctgcatcgtattagcgctgtcgagcacgatcagaatatggcgtttattcaggctctgcgccactttgctacttttgcttatgggctgcatctggcagaagaaaatgttcagcttgagcaacttctggcgctctcttcgccgatttaccgccttgagctggcgatggtcgggcgactgtttgctcaggatccgcagctttatgccgacattattatgtcgtcagagcgtaatctggcgttaatcaaacgttactataagcgtttcggcgaggcgattgagttgctggagcagggcgataagcaggcgtttattgacagtttccgcaaggtggagcactggttcggcgattacgcacagcgttttcagagtgaaagccgcgtgttattgcgtcaggcgaatgacaaccgccagtaataatccagtgccggatgattcacatcatccggcaccttttcatcaggttggatcaacaggcactacgttctcacttgggtaacagcccaataccttcattgaacgggtaatttcccctaactctttcaatgctttttgcatttccgctgattcaagattggcctgaatatccagataaaacatctcttcccatggattaccgtgaatcgggcgtgattccagacgggtcataatcagattgtggttgcgcagcaccagcaacgcttcaaccagcgcaccggcttgttgcccggtcgccattaacaacgtcgttttcgccggaacctggtcagacatgttaatggctttacgtgccaacaccacaaatcgggtgaagttttgttgctgattcgcttcaatacgctccagtacctgcaaaccgtacaaagtgccgccagcttcgcttcccaacgcagcaacatgcggtgattttgcctgtgcaaccttttccattgccgcagacgtactttcggtatattcaatcttccagtgaggataacgattaaggaatttgctgcattgctggaatggctgcggatggctgtagaccgtattaatggtggataaatcagtcgtgccggagaccaacaaacaatggtcgatagttaacgtcatctcgccaacaatcgacaagctggtatgttgcagcagatcgtaaacgtcgtttatggcaccggagctggtattttcaatcggtacgacggcatagtcggcctggccggtttccacctgattaaaaatatcggcaaatttggcgcagccactttcaatgaattgctcaaagtgacgggcagcatactggcgcgccgcaagatgggaataagaacctttggggccgagaaaagcgatgcgtgctgagtgcggattaattttattgagatgttgctggagcaaagcctgctgagttaatacggaatcttcaatgatgagctggaacaggcgagtaatgtaatgggcgtccagatggtgcgctttaccgagcgtaattaatctttccagtaaatcgcgttcacgatcaatatctcgtaccgggcgatgcgagagcagtttggcttttcccacctcgacggccagttcgcgccgctctgccagtaatgctaataatttttcatccagcgcgctgattttctctcgcagcgccagtaatggattttccgatgtcatagtgttgccttttttgttatcaataaaaaaggccccccggtttgggaggccttattgttcgtcttcgcattctgtttcacacgacgaaacgcctcccattcaggggaaggtaaaaaagaatgcgaagaaaaacggtgtgtgtttcatgtttgtttccttaagtgactttagtacagtacccgtactgttttcacgctgtcaacaaaaaacgcgcccgaaggcgcgttggcgatccactcaatataaaggactactcttcttcaacttcttcgacgaagttggcgtctttcaccgatgttgcggcacgacgtgcttcgcctttgtgctgcagtttattgagctgccgttccagcttgttgatcaattcgttaattgcagtgtacatatcttcatgtttaccactggcaaccagaacgccgttaggtgtattgattgtggcgtcagcaacaaacccttgtggctctttggacagaatgatatgtggattaatcagatgtgtttgccatttttccagtttggcgagacggtctgcgacatgttggcggatggccggagtaatttccatttgtttgctggtaatgttcattgtcataaattttacctcttgtcttcccgtcttggtgaattcagcataccgttcctgatgtcaaaatgtgtgatgggaatctcataattttgtcactttttgtcaacgaatcttttttgtgagaaatcgcaggaagaggtgtttttttacttgaggaatatctcaaagcgagccatatttgatgagatcgatagtgactaaatcgcttcagtttcacaactaacagaataaaaaaacggcagctcaagggctgtaatgccagtcagttaagcaactgactggctctttttcggggctgtggggtatttccagggcctctcctttaccactctcgggaaggccctttcccttctcgtcggtaatttcacaagttgtcccatacttgcaagatcgcgcatcagctccggtatacgtcccggtgaagcgccctgcaatgtcatcagcattctcatcaccattccgcatgattctgagaaactcagttgattcggccagtaacctttcagatgttccgccattttaatcatctgatatctcaccagattataagccagtaagacactgaggtgtactggcaatagcggacactaccatttgttctttttttaagcagccatctgatgatatttttccctgaaggctgccggggagatattccccagacgagagtgacgacgctgacgattgtagaaaatctcaatgtattcccgtattactgagatggcttcatcccggttattaaaacgatagtggctcaggctctcatttttcagcgttccccagaagctttccatcggagcgttgtcgtaacagttacctttacgcgacattgatgttttcagaccagactgctcctgtatgacccggtaatcgtatgcgcagtactgtgaacctcgatcagagtggtggattagcccggcaggtgggcgctggctcctgagcgccataaacagggctttacctgtcagctcttttgtcatgcgctctcccatggcgtagccgacaatttcgcacgtataaacatctttgatgccagcgaggtacaaccatccctcctgtgtggcaacatacgtcaggtccgccacccagacctgatttggtgctgtaggagtgaacgtctggttcagcagatttggcgcaactggcagattgtggttcgagttcgtagtcgctctgaacttgcgtttctgcttacagcgtagccttagctccttacgaagacgtgccagtcggtcacgaccaacgatgatgccattctctgccagctccgtctggagccgccgggttccatatgtttcgcgagtgcggatatgtgccaccttaatctccagttttagccgctcatcactttgttttctgtctgagggttcatgctgtacccagttgtaataaccgctcctggatacaccaaatacctgacacatcgcttcaatgggaaattgttgtcgccattgttcgattaacgcgtatttttcagcgactcctgtgcaaaatacgctgttgctttttttaatatatctcgctcaaggcgagcttcatttaacgccttacgcagttgcagaatttcagattccagttcagccaccgtgcgggaaccaggagtaccgagcccttttctggcggcggtaacccattgtcctaaagtgccttcaggaagagataatcgggaagcgccttcactgatcgaaagttgattttcaagaaccgttctgacagcttcggctttgaactctttagagtaacgttgggtttttctgctcattattagctccttctgatgccattctatttcaggaaggagtgtccgttaaactcaggctacctcataccccacagctcttgctccacaagctccggctttttacttctcagcgtcagcctgctcagttgcatcgtctgttttatctccctgtatcccagttcgatttcccagcgatgactgtacagatccgccatttctcctccggggaagcgcatggcgtccgtcatcgacgtcagcagatggcagacttttcctttgcgcgtcacggtcagcaggcgggctgtcacttcatttcccagtcccggccacttttttcgtgcctgcgggctggttttcagcttcaccagatgatcgcctttacccagttttctgagctcttcatattgcgctccctttctgagaggtatcatccagtggcggtgttctcccgccaggctccaggcatttaacagtcccagtgagtaataacctttatccattaacgtcagagtgttatcgccggtttgttctataagttgctcagcaagctcattttcgctgttcttcatcgtgccgaaggctgcagccgtcagcagatggctggtcagttccatctggcagaccattttgacctgcgggtagagcgccgggttcccggcatgtgtctggcgggggaaggctgcatcgttctctggtgtatccggtgtgcgccagaacacaccatcgatggccagcagggtcaggccgcaccagtgcggatgcggcgtggcgttatgccagagctgcgctgttttcgtgaacacgcggcggacagcctcacttcccaggcgctggcgggcctgaataacggcactgggggcaacgaaggggcgattgcccggcagcatgatgtccaggcgattcacaatctggtgaagaggttctttacgctcaagcgccatgccaacaatacaccagaccatcatttcgaggggaagacggcgcttgcgtagcgttacagtacctgattcggcaaggcaacgagagatgagttcggggtcgaggtaatcccccagagaagtcagtgggttacgcagagaatcgtaacgggataccagatcaagagcctgtccaatgtgcataaaaaaatccggaaacaagtgagcgtttccggattcttacacagccactggatcggtcaactgatccttaactgatcggcattacaccaccgggacgcggattcatatcttccaggtcgcggcagtcattggaagagtaaattccccagttgatcccggtggcgtaggcttcaaaacgggacttcatatccccgcgcagtaacgccccggcgttaaatttggcgtaataaacgccctgcttactttttcgtaccagtccggtgttgatccgctgttcgatgcgggtcagatacggcaccagtgaatagttgataaatcccagccccagctcttcgatattgttgaaggtggcgcgatcggtgttctgcaccatgtgcaacggcacccggaacagacgacagatttcttccagctgaaacttgcgggtttccaggaactgactgtcctcggcgttcagcgccatcgacttccagtccagccccatttccagaatcatcgggcggtgagcattgccaagccccgtgtgacactcctcaaaatctttcttcagacgctcgtaagcatccggcgtgagcttttgttccgtacgcaacacaccggatgtcaccgcaccattactaaacaacctggcaccgtgctcctcggttgccgctgccagtgaaatggcctcacgcgcatacgcaatgggattcagcccgacaaatccatccagcgtcagggtgcgcacatgccagatttcattctgggtcaacacatccacggaaccatccggaaacgtcacctgataaaccggctgccactggctgttcagcttcggttccacacagcccggatctatcggaagaagctccaccacttctcccagtgcctttaccttgtaggcgtaaaaattcccccgtagacacaggcagacaataaccagctcccagaattcctgcggtgtcatgtagccattaggttttgccgaaaccaacttatgcagtcgttcatccaccgcccgtgttttcagggtaccgctgattttgtagagactgcagggcagcataccaacagactctgccagcaccctgacgcaagaatagaccgccgtcaggcgcatggcccgctggctactgatccgctttccggtataggtgtcgtatgacagcccgatagcatcagcagttctgctggcgtggtcaccggcacatcgctttttcgttgaaataatcccgaaaagaacactatttacctccgccgacagactgccgtgtacggtcgagatatcgcgccaccagccacgaccagaacaggcacagcgccccggcaacaacaaaacccgccgggggataaatcagccaggcaccatacgccagcaaaagcgcacccagcacgcccaccagaggcgcgagaatcagcatgatcataattacctcagttaaagcgagcggatcccgtaggactcaatgtggtcagacagcgtgtcttctttctcgtacagcatggctctgccaaccgccataatcagcgcaactgcaccatcgattttgttttccgcctgctctttgacgggtttcaccacatcatcgttacccggcatgtttttgccgaccacgttgccgatacaccaggtcatgatgggattgccgtcatgatgaaaacgtcccgattcaatcgctgcttccagctctttcatcggatcggacatattggtgaagttctggacgatagtgacgggattcaggtcttcatcagcaaggtcatgtgacaacccggtcgccccgaaggggtcgatgggtgactcactgaccgggctgattttgttcgccgctttggcctcctcgaggatgtagcgataatccacctccgcaccatcggtaacggtcagaacgcccatttccacccatttctgaaagcgttcggctgtccgtcgatcttcatttttctcgacgctgtacaccgtgtcatacggtacccagaaacgcggggccacactgtagtaatgcgttttaccgtcaatctcgcgggtataaagtcgcgccatgctgttcatatccagcttacgcgccaggtcaaaggccagaatgcacggctgcccctcgaactgctcaagggtcagtgatttatcctcgcagctctgccagctcaccaagttgaaatacgccgaacgcgccgacacccagatattgaggtgttttgttttaaagacgtttgccagacgggcgttatttttcgcacgctgctgctgacttaacaaaaattcgcgataaaccgacacgccaatatttggattggctttttccagcacctgcgggccggtccagtcgtcaccttcatcaacggtatagatgatcccgaacagttcatcgttaggcaccgagccgttgagcatctcgatgacttcccgccgcttgtcgtagcacggcccctcaatgttgtacccggcggtggtgatggcccacatcagtggctgacgtcgcgcccccatcccggtaagcattgtggtataaagcgcatcggtggcatgctcgtgatattcatcaaccacggcacagtggggtgatgaaccatcacctgggttgccgatcagcggttcaaaccgcgcgccatcctccggacggttcatgtttgaggcgttaacctcaatcccgaacgcttccgtcagcatgggtgtgcgtttacacatcagtcgcgccgggcgaaagacttcccacgcctgtttctctgtcgtggcaccggaatacacttccgcgccaaactcgttatcacaggcaaaacaatacagggcaacaccggcagagattgctgatttgccgttcttacgggggatttcggtgtacacctcccggaagcggcgcaaccgggtgcctttattgacccagccaaacgcacagcagatcacaaatagctgccacggctccagcgtgatgggcatccgtttgaatgcccactcccccttggtgtgcggcaacagctgaataaatttcgcggcccgttcagccaggtccttgtcgaagcggtaacgaaacgacttacttttttccgccatcaggtcatcaagatggcgctggcaggcctgaatcacaaactggcaggcaacaatctttccgcgcacgacatcccgggcatactgatttgcagcatttacgttggggtaagatttccggctcatgattcgataattttcagaaacgggttagtggctttcttctgccccgccaggccaatcagacgctggcggctgctggggtcgagtccgagcattgcccccgtgctgctcatctcggactcctgttcttttttggcggtcagctccggatttttgaccctgccgcccattgcaccggtgatggtgttgccctgtatggcaatatttttcacggcacgtcgccagaactcataggccacgcaccaccgctcaagtaccgccaggtcagtcacgcacagcaggccctgaccgcagagttctttggttgtcagttgccacatgatcgtggcgagagggagatcttcttcagcgaaccactctggtggctcaacacctttgatgggcgtaaaaacaggttcatctttgttcagggctcgcttgccggggtttccggccagcgccttgcgcgccgttggcttggggcgacgcccggaacgccccgccgttccagccatatgcggcactcctggttaaatttcatttttcgcgggtataaaaaaacgatggggcgggcagtccggaagacgtcaggtcacagggatttgccccgcccctccctacaagtgagaataattatcaccggattcgttcgcgcgctgttttcgctttatggcagggccagcacagactctgcaggttgctgtctgcgtctgttccgccatgcgctttcgggatgatgtggtcgacggttttcgcctcgctcaccacaccgacacgcagacacaactgacacagacctttatcgcgcttcagaatacgggcacgaatcaccgtccattttgagccatagccacgctggtggcggctcagtccgcgctggtgctgcacccagccttcaccgcgatgtttatcgcagtaacccgaactgtctgtggttgtacctgcacatccacgcttacggcaggcacgtgggattagtgatggcataaatacctcataccctgcgaaatgtttaccacgataaaaaggctacttaatgcactgagtgcggatatactcctgtgccccttccagttgcatctgcatcgtcatcagccgctctctgagggtgaaataatcccgttcagcggtgtctgccagtcgggggctggttgcattatccacgccggaggcggtggtggcttcacgcactgactgacagactgctttgatgtgcaaccgacgacgaccagcggcaacatcagcgcgcagagtttcattttcagctttcgcatcagctaactccttcgtgtatttagcatcgagtgcattaacatcacgctgtctctgctgcatgtcagtaatggttgcgttcgccagcttcagttctcttgcgtttttgtcgcgctgctctttgtaggtaatggcgttatcacggtaatgattaacagcccatgacaggcagacgatgatgcagataaccagagcggagataatcgcggtgactctgctcattgctgcccccacaaacagacttcacgctcaatctcacgacgggtcatcagccctttccattgcttaccgccagcatatgtccagcgacgtagctggtcacatgcgcctttgatatcgccctggtttattttgcgaagaagcgtcgatgttctgaaattgccagcgcccacgttgtaaacgaacgagtaaagagcgccgcgcgttgtttccggtatatcgactttgatgtacgggttaatttgtctggcgacagtggcaaggtctttattcaggagggctttgcattctgcttcggtatacgttttaccgagcatgatgtcttttccggtgtgtccgtgacatacagtccatacaccaatgatatctttgtatggtatgtagctgacaccttccagaccatcgttaccacctgggccagtgattaacacagatgctatagcaacagccccaccaccaatagcagctgcaacagccttgcgtaatgatggcgacattattcacctctcgcagccttacgcttgtcttctcttattttgaaatacagatttgtcagataagtcagaagccccagaagcagacttcccagcacaccaatcgcagcccactgtgatggactgacctgatccaaccactgcaaaaaccagtagccggcactgccggcggaggtgccgtaggcaatgcctgttgatattttttccatctgatacatatcccgccccccgacagacctgtgctatcggaaagaaaaaaggccatcagcaaaactctgatggcctgaatcacctttaccaatattgtatgaaaaaacacgcacgactaattgacaataattttcatttccattaaaaaagatcgcgtagcattcttaattcatgaggaactttacccgccagcaatctgagtagcgaaagctgttcatccccaatgtttttgctggcgggtccttttttctacggtcctcctccccggaggggggcatttcattatttttctaatcgttactggtgagaaggcggaagaaaaagccagttcttcgcccctaaataacagcatgattccagtccatgcaaaatctgatttccagctcacacataccgagcgctgtacaaaaaaccgccagccaaggcagttaagagtgtgttcccggggtttgcttagaatattttgtaagttgtccgaagagatatttacaacaccagaatgatgaatcatcagtcccctgccagaggttcactacgtaacctgaccgacaatgcaccattctggtgctgaaaaaagagcactggaactgcaacaaaacaacatcacagaacaggagatggtaaggagtcagacattcccacacaatattgtgtcagtgcaaataacaaccttcgtctcaaatctcgctggagcgggcagcgggaatcgaacccgcatcatcagcttggaaggctgaggtaatagccattatacgatgcccgcatatggtgccgactaccggaatcgaactggtgacctactgattacaagtcagttgctctgcctgctgagctaagtcggcgctggcccaccaccgaggactcgaacctcgcaccgtcaacttagaaggttgatgctctatccggatgagctagtggtggttggtggcccttgctggacttgaaccagcgacctggcgattatgagtcgctcgctctgaccaactgagctaaagggccggaggcagaataataaccatatgtcatcacatctgcaaactcatctgaccaccagcacgtttaacgtcctgtgccgtttttcaggtataaaaaaacccgctcatcggcgggtttaagctgtgtggcgtagtaaccactcttaacaggatattcaactttttacgatcgtaaagttttcggaaaaaatttttaaaaccgcatcaaccgctccaccagttgctctttacgggcaacgatccacccgtgttgctccagataaaatttaaaccgttccagagtacataccatcgcatcggcgggtaccttttccgtgaactcaacctgaccgtgtttatcgaagtggctcagtaatgcgcatccatcattttcgatagatgtgttttgtgccgctggtggctgtttctggttgaaataacagtcttccagtttttcgaacacttcccacgcctgatcggtttcgagcattttggcgtgacgggctgcgccacgttctgtccagaggatgagggagcgaacgttacgggcaattttcacagaaactcttaaagagttttcgttcttcaactctcgtaacgcatcaccttctatcaggaaaaaatgtttaccttctataaaccgttctttgtttcgattgaaattgtttgtcaaacgctggcgctctgttccgtacaaatcagccagcagctctgttgtcatgacaggaagatggttatgcgtaagtgacgggagtttttcaatagacgtgcgattcatagacatgtcctttcgaatattttgatttaccccttttgagagggtgaccgggcgctcaaaaccgtcgaaagtcggcgggcgtatttccattgctggtattgtattagccgcacacccggtcataaaccaagaattctggacacaaaaaaaccacatggctatcgggtgtggataccgctttcgaggtgttttgagcaccgcggggaaatgtaaactgcaaacctgaaactgtcaacaccgtcaggttccaatcatcgggtggtgagacgcacagggttggaactaccgggaaaccgaccggcgagcttttcagctcccccatgcgccccaccataattcagatgtgcgcgtgcatacgacaataaaaaacacgctcgcggcgtgtgtctgtcgcggtctctatccggggttccaatcccgacgccagattttgctggcgcgtgaggaatatagccccggacaatgtgtctggtcaagcacctacataattcgttctacgtatctgtccatctccagccggatatcaagcatcatcaacatgccatcaataaccccttccgctttctgcaggcgcttgccaatacaggtatccgaacacccatgtttccgtgccagactcataaaagtcattccacctacgtaataatccaccagcaaatcgtgcaaatcctgatttttcttgttcaaccgggccatacagccacaaattatcattgcatcatcatcagaacactgagggcgtgatttcactttcgacggaattaaccctttaaaaccagcagcgatcgacgcccaggatacatcttcatgagtgtttgcagcccaagccccccaccgttccataacctgctgaatatcacgcgccatcgttatcacctgtgatttcataaatcttcacgcccagtcgcccaccaggaacgagctgaccgcgcacaatattgatttcatcaaactgctcgtcgtctatgagtagtccggcatgcgtcagcgcatccagtggtgctttcaggatattgtccaggtcacgacggcgcttatccggtggctctgcaataatctttatcgccagccttccggacaggtttaatttcagccgctgctggcgaacaattagcgtcacatcacggcgataacgctcaccaacttttgatacaaaatatgtgctgccacgacgtcgccagtaagtattcaccgtcggcggataaggtaaaataaactcatggcgcatcagcgcagcacctcctgcaccattttttcaaactttccaactttggtttccagctctgccacacaatcaacgagctcatccaccgctttttgtgcgcgatgtttcgcctgcatcagttccctgagcgctggcaccatatcccgacgaatggcatcttttgttacacctgttttttccagttgttccgcctgtcgcaacatttcctgcgcgtgtttacgcaattgttcagaggtaaaagtcattgtctggttgttcaaaagaaacgctccatcttactgctgtcggtacgtgtattgctgtatctgcgcggctggggctgccgcattggggtggaaagaacctgtgcgctttcctggtccacaggcagaaaatgtccgttataaaaacgccggtaaatcgtccccagagaaccgttacgttgtttcgtgatattaatttctgctatgcctgtagcctgtgtatccgggttgtacacttcatccctgtaaagcatcagaatgatgtctgcatccgcctctatttctccggaatttttcaggtctgagttcatgggacgtttattgggtctggactccacaccgcgggagagctggctcagcgcaatcaacggaaaaccaccggattttgccaggcctttaagcccctttgagatttcacccacggcaaggtcatgacgccccgtggttcgggtttttatcagcccgagataatcaaccaccaccagcgccgtttccggatgtttaatcagatggtgtttcgttgttgcgcatatctcatcaatggtcaggttcgcctggtccaccatccagatattgcgcccggtcatccgccccaccccttgtgagaaacgcgcccagtcttcatcttcaaagtgagccacagatttcaggcgtgatactggcatccctccagccgcagacaccatacgttcaccaatctggatgttcgccatctccatggtgaacagaagcacaccatgcccctgctcagtcaccttgtcgatgatgtccagcgcaagttcggttttccccatcgaaggacgggcggcaatgaataccaggtctccgggctccataccgcctgtttttgcgtccagttcatcaataccggtcatcaacgtcctggatttctccagcccctgattccggcattcaacacgctcaaccacttccggaagcacatcatcaatatgtaccggctgaatgacgccctttcctgtcgacagtgtgaccatcatgttctgcgcatccttcagggcatcttcagctgcttcacaggtatgcgcatcacgtaatttctgcagcgcctcattcagtgttttttctgcatcgcgcagtgcggcattgcgccgcaacgctgcaacatagtgctccagtgaagacttcacccaggttttacgcccggtatcagtaatcaccggggcaagttccggcatctcattacacaacagcacggggtcaatcactcctgaaacacgggcctgtctgcagatgcctgtgtagatatcccgatacgctcgtacagaaaaaatgtccgccggtagtgtgatcagaatatccatcacttcatgatctgccccacgcagaaagaatgcgccaatgacagcgccttccaggtcatcattacgccagactggtgttgtcatgcagccacacctctgatacaagaacggtagctgggccagttgaacgacaaccagttgcgccccccgtctgtgatcctgtcggcaatgcgggggctgatgaacgctggatttgcccctatatttccagacacctgttatcacttaacccattactggcttgctgccgtagatattcccgtggcgagcgataacccagtgcactatgcggatgccattcgttataatgctcgaacgcctctgcaaggttctttgctgccgttaacccgtctggtttgggcatgacactgatgtagtcacgctttatcgttttcacgaagctctctgctatgccgttactctccggactccgcaccgccgtgctcttcggttcaagccccaacatccgggcaaactgccgtgtttcattagcccggtagcatgaaccattatccgtcagccactctactggagacgccggaagctcgttgccgaagcggcgttccaccgctcccagcatgacgtcctgtactgtttcactgttgaagccgcccgtagtgaccgcccagtgcagtgcctcacggtcacagcagtccagcgcgaacgtgactcgcagtttttctccgttatcacagcggaactcgaacccgtcagagcaccatcgctgattactttctttcacagccactctgcctgtatgtgcccgtttcgatggcggtacagcaggttttcgctcaagcaacagcgcattctggcgcatgatccggtaaacacgtttggcattgatcgcaggcataccatcaagttctgcctgtctgcgaagcagcgcccatacccgacgataaccatacgtgggcagctctccgataacatggtgtatacggagaagcacatccgtatcatcagtgtgacgactgtggcggccatccatccagtcatcggttcgtctgagaatgacgtgcaactgcgcacgcgacacccggagacaacggctgactaagcttactccccatccccgggcaataagggcgcgtgcgctatccacttttttgcccgtccatattcaacggcttctttgaggagttcattttccatcgttttcttgccgagcaggcgctggagttctttaatctgcttcatggcggcagcaagttcagaggcaggaacaacctgttctccggcggccacagcagtaagacttccttcctggtattgcttacgccagagaaataactggctggctgctacaccatgttgccgggcaacgagggagaccgtcatccccggttcaaagctctgctgaacaattgcgatcttttcctgtgtggtacgccgtctgcgtttctccggtcctaagacatcaatcatctgctctccaatgactagtctaaaaactagtattaagactatcacttaaataagtgatactggttgtctggagattcagggggccagtctagcaactaaagcactgcccgtctcctggttaaccccatgtgctataccgccggtatagacaatcagcgagcctccggcgctaatattgctgccagttgccgtaccatctttctcaacaacctgccggctcccggtggaaatatttgtcgtgtcagctttcccgccgctcttgatattttgtgttccgctgttgatattggtacccgtggcaataccatgattattaatattctgtgtaccaccattgattatggtattggtcgcgtttctggtaacatccattaccccgccgttatctattcgggtcgcatcagctttagcattcgttaaaactgacattgttcctttatctttaataatcgtcttatttgccgaaccatatgcgtttatgtctaaatgaccaccgttttccagcaacacattgtctgccacgtgattgtggatggagaatgcaccttcactattcgtaccgctcaccgtcgtaccgttagtgtttgtttttaaaattgcaccatcgtgctgggtaacatttgttgccgtaccaccactaacatcaagcacgccaccggaataaacttcaataacatccgaggagctggtgtaatcaacaatttgcgtaccaccagaatagatctgagtattttttgccgttgacttattattcagagactgagttccaccttcaatcgtcgtgtccagcgcatggctttcatatactctttgctcaccgccatttttaatggtggttgttcctactgtgctctgttcaacatactgtcgtccaccatttatgattgtgttcgttgccatacttccttgcgtgatgtcctgataaccggacttatttatcgttgtaccatcaacatgcccctgagttgttactgtctgccctccaccatcaatgatggttccattcgcagtccccccacttatgtgtgaattaccacccttaattgtcgttccattgctgataccacctgtataaacgtcctgattgccactgtcgattatcgtaccggtggaaatgcccccgtcatgaattgtctgtcttcctccgttaatggttgtattattagactgccccatataattgttattccttccaacatcttgatatccaccagattcaataagacttccattagatactccgccataaacactctgctggccatggttgataatatgagtgttatttgttgtacctcgttcatctactcgttggttgccatctacagtctcatcgtttaccacaccaataacattagtagtaaaggccgccatcacgggcggggcatatatcaaggcagatatcaataaggaaagtactgagcggcgacaataatggggactggtcctgttcataaatttcatcctctgaaaagtgaatactgagtagcgtttaagcgactttagctctgctgcaacatcagcccgcaggcaccagaccggggggttcatcctgaagagacagcgcaagtgtattgtgttcaccgctcatcaaagacatcatgatgaaatgatgatgttccacataagaaagaggcattttttaaacacagtgcgctgaagtgtgattggataaaaaagtcaatctattcaggaaatacgggcgtattcttttctttcgacaatcaggccgtcggcaaaataaaatgatttacataatcgtttctgatgaatatcttctgctcacataaaaatcacacaataactttgagatcgcagattcttttacttttacagcattcgtccccccattgttgggcaaatatagattgggccagagcacgaaagttaataccacgtttgcacagctcctccaacagcacgacaagatgccacatactgcgccccagtcggtgcggtttacagactacccgtgcgtccaccgccgataatgtcctgagcagttttttcagtccggacctcctgccacggttttacgttgaagaggtaaccctgagcacgcagttcttcagtcaggcgtggtgcaccgtaacgctgttattgctgggtaagatcaaaaaactttcaggcagctaaggaaagttgaaccagacattagatgaaatatttcaaccaattacagcaccaatttaaactcagtaaatcacagcacagatcaaggggttacgtgaaagcgtagcccctttttctttggtagtggcagcaaaatggttgtagtgtaaaaaataatcccgtttaatcaatcaataatacatattgtttcaatctacgttattatctctttgtaaaaatagccatttattaatcattgaaaactgcttttagaacttgatacaacgggactagtcacaacaggactattctcaacgggatcatcctcagaggaactatcatcaaagtcatcatccataaataaaatatcatcgaatggtgccacgcccgtgatgagttttattttattattacgatcagtcaagactccacttaaaccgttttcgctcacaggttttaatgatttttcattactcttgttgtaagcaggcgcattaaaaatacacggagtatcaagatcaaacaatgacgttccccagttcacatattgaatatcatagttactgaagttctgtccagaaaagaagcatcccttaaaatccaatccacctaaattatataaaccatcctcttctttttggagagtaatgttaattctggctatctcccggacaaaacttccttttttgtatttgaataccgtttcaagattttcaccagacagcttgacttctgggaataatttaaaattaaaccctacatcattattattcaaagtagatgaacgaaagatggaaaaagcttgtagtgctgaattatagctttcgattttatcttgaggctgcgctcttggtaaaaacttatagcagcactcataaaaattgaataaacgttctgaacaattcccatttttatcaattaataccccccggaattctttcacaaaggcatccgttattttttgaatatctatggtgtgttcctttgactctgacaaagatggagtctgttgaagtgcattgctcatctggttaaggaacatctgcatttctttaaatttatctccatagtggcctttaacttgctgagagtttttagttacaggtgaaaccttatctatttggttgtcatataaattatgtggttccatacagacatttggttgtgtttctaaaataacactacgtgtactacctggcttaaatgaatcaacatgaaaatcactttttcttatattatcgaatagggtctgttcatttctcttagcgcattcaataaactgatcaacattatttttattcgatgacaggtcagtttcagaaaccgcattttctttgttctccagctttagtttaatgagaagatcttcccagacctgcttgcttaaacatactacgtcaggctcaccatcagtaactaactcttcattattatcaaagtatacgttgaatacttttaagttattttcatcaacatcatatttaatacgttttaattgctctccagatcccataatgacaaaggcgttgccttcatgatatatacattcagacatcattttttgtaaagtttcaagagcaccgcgatacgtccctgaggcagcttccttacaaattaaatttataatactataagctagtagctccatggattcagaagattttctttcattacaatttccactatctataaatgagctagtgttaaattcgttgcttttactaactaacattgtctattcctcagttaatgtctacatggctatttttaattttattattgtttgtcactataaaaaatcgctcatttgagacaattgctggcattaacagcttcatatgctatacatggtacttttaattaaattagcacaagaatgttaaatttaataaacaaaaagttatttcgctgtatgataaaaaccacccgttataatttattagtgaaattcgtttttcgagtgttagaaatttatatctaaatagcgttgattaatgagcaaagccagactcctgtaacgctcacaagactcatctacctgcgacgggtattctggtcagtagtagatgtttaaggcgtggcagagacatttcatccttactctacggcattggcccgcatacaaatcgtggttgtgacactcacttatcatcagtgagcgaacagagaatagttcagtgatttgggtgatgctgccaacttactgatttagtgtatgatggtgtttttgaggtgctccagtggcttctgtttctatcagctgtccctcctgttcagctactgacggggtggtgcgtaacggcaaaagcactgccggacatcagcgctatctctgctctcactgccgtaaaacatggcaactgcagttcacttacaccgcttctcaacccggtacgcaccagaaaatcattgatatggccatgaatggcgttggatgccgggcaactgcacgcattatgggcgttggcctcaacacgattttacgtcacttaaaaaactcaggccgcagtcggtaacctcgcgcatacagccgggcagtgacgtcatcgtctgcgcggaaatggacgaacagtggggctatgtcggggctaaatcgcgccagcgctggctgttttacgcgtatgacagtctccggaagacggttgttgcgcacgtattcggtgaacgcactatggcgacgctggggcgtcttatgagcctgctgtcaccctttgacgtggtgatatggatgacggatggctggccgctgtatgaatcccgcctgaagggaaagctgcacgtaatcagcaagcgatatacgcagcgaattgagcggcataacctgaatctgaggcagcacctggcacggctgggacggaagtcgctgtcgttctcaaaatcggtggagctgcatgacaaagtcatcgggcattatctgaacataaaacactatcaataagttggagtcattaccgtgatttgagtaattaacctgattaaatgaaggggtataataaatgataatactctggctttatcgttaattacttaattccacatgtaagcaatttgcccgcttggcatagcaggcattttttccaggtacttttgaatgagtactgatggataaatacattgcagtggcgtgccacgtaccaaaacaccagccctcattcgaaaccacccaccgcacttcttccttgaaatggcgttagtcatgaaatatagaccgccatcgagtaccccttgtacccttaactcttcctgatacgtaaataatgatttggtggcccttgctggacttgaaccagcgaccaagcgattatgagtcgcctgctctaaccactgagctaaagggccttgagtgtgcaataacaatacttataaaccacgcaataaacatgggtaatgactccaacttattgatagtgttttatgttcagataatgcccgatgactttgtcatgcagctccaccgattttgagaacgacagcgacttccgtcccagccgtgccaggtgctgcctcagattcaggttatgccgctcaattcgctgcgtatatcgcttgctgattacgtgcagctttcccttcaggcgggattcatacagcggccagccatccgtcatccatatcaccacgtcaaagggtgacagcaggctcataagacgccccagcgtcgccatagtgcgttcaccgaatacgtgcgcaacaaccgtcttccggagactgtcatacgcgtaaaacagccagcgctggcgcgatttagccccgacatagccccactgttcgtccatttccgcgcagacgatgacgtcactgcccggctgtatgcgcgaggttaccgactgcggcctgagttttttaagtgacgtaaaatcgtgttgaggccaacgcccataatgcgtgcagttgcccggcatccaacgccattcatggccatatcaatgattttctggtgcgtaccgggttgagaagcggtgtaagtgaactgcagttgccatgttttacggcagtgagagcagagatagcgctgatgtccggcagtgcttttgccgttacgcaccaccccgtcagtagctgaacaggagggacagctgatagaaacagaagccactggagcacctcaaaaacaccatcatacactaaatcagtaagttggcagcatcaccccgatgtaggtaatgactccaacttattgatagtgttttatgttcagataatgcccgatgactttgtcatgcagctccaccgattttgagaacgacagcgacttccgtcccagccgtgccaggtgctgcctcaaattcaggttatgccgctcaattcgctgcgtatatcgcttgctgattacgtgcagctttcccttcaggcgggattcatacagcggccagccatccgtcatccatatcaccacgtcaaagggtgacagcaggctcataagacgccccagcgtcgccatagtgcgttcaccgaatacgtgcgcaacaaccgtcttccggagactgtcatacgcgtaaaacagccagcgctggcgcgatttagccccgacatagccccactgttcgtccatttccgcgcagacgatgacgtcactgcccggctgtatgcgcgaggttaccgactgcggcctgagttttttaagtgacgtaaaatcgtgttgaggccaacgcccataatgcgtgcagttgcccggcatccaacgccattcatggccatatcaatgattttctggtgcgtaccgggttgagaagcggtgtaagtgaactgcagttgccatgttttacggcagtgagagcagagatagcgctgatgtccggcagtgcttttgccgttacgcaccaccccgtcagtagctgaacaggagggacagctgatagaaacagaagccactggagcacctcaaaaacaccatcatacactaaatcagtaagttggcagcatcaccgccgatgtatataatattaacgttacgtcaccttccggacagcaagaaacatttaaaatactaatcaatccagaacatctacggcagacacttgagcgtaaatctcttactgctgttcagaaatcacaatgtgaaatcatcacccctaaaaaacccggcgaagcgattcttcatgcttttaatgccacctaccagcaaatcagggaaaatatgtctgagtttgcacgttgccattatgggtatatacaaatccctccagtgacaactttccgcgccgacggaccagaaactcccgaagaagaaaagggttactggtttcatgcttatcaacccgaagatctttgtaccatccataatccaatgggagatttgcaggattttattgcattggttaaagatgctaaaaaatttggtatcgatatcattcctgattatacctttaactttatgggaattgggggtagtggtaaaaatgacctggattatccctctgctgatatacgagcgaagatcagtaaagatatagaaggtggtatccctggctattggcaaggtcaggttttgattccattcattaaagatccagtaacaaaagaacgtaaacaaatccatccagaagatatacatctcactgcaaaagacttcgaagcaagtaaagataacatctctaaggatgaatgggaaaacctccatgcattaaaagaaaagcgtttaaatggaattcctaaaacaacacccaaaagtgaccaggttattatgttgcaaaatcaatacgttcgtgaaatgcgaaaatatggcgtacgaggtttacgttatgatgcggcaaaacactcaaaacatgaacaaatagaaagatcaataaccccaccgcttaaaaattataatgagcggttacacaatactaacttatttaacccaaaatatcataaaaaagccgttatgaattacatggaatatctggtaacttgtcagttggatgaacaacaaatgtcatcactgctttatgaaagagatgatttaagcgccattgatttttcattgctcatgaagacgataaaagccttttcattcgggggagatctcctaacccttgcatcaaaaccgggttccacaatctcaagcatcccatcagaaagacggatattgattaacattaaccacgattttcctaacaatggcaatcttttcaatgactttctatttaaccatcaacaagatgaacaattagcaatggcatatatggccgctctcccgttcagcagacctttagtttactgggatggccaggtattaaaatcaacgactgaaattaaaaattatgatgggtccacgcgtgtcggtggtgaggcgtggcttaataaaggttgctctacctatcagcagctctacaatgaattccacgcattatatatagataaagcaggaatatggagcgcatttgagggtgtatttgcaactaaaaacgttctggcctttagtcgtggggattctgtgaacattaatcactctcctcatgatggactagttataataaataaaggaaacgaagaagttgaaggtacctggcctaacaaattgcaacctggaatatataaaaacatggggagtaatagcgttaacattattattaataatacccgaaaaattatcccccctggtaaagtatttacgcttagaggcggaactctaaatatcaatattcctgggcgtagcgctcttcttttagggaaaacaggagaaccgccgaactatctctatttataatttaatgttatatctgccccgataaaacggggcagataatatgtttagtttactaacggtcattttgcagtgaagccatttactgttttttatcgaccagataatctgttctctaatgttaactccccctaacctgttgctttagttattcatttcctgtctcactttgccttaatactctacgttaaatgttactaatttgttgcttttgatcacaataagaaaacaatatgtcgcttttgtgcgcatttttcagaaatgtagatatttttagattatggctacgaaatgagcatcgccatgtcaccctacatctcataagaggatcgcttctgatgaatgcactgaccgccgtacaaaataacgctgtcgattcaggccaggactatagcggattcactctcatcccgtcggcgcaatccccgcgtctgctggaactcaccttcaccgaacagacgaccaaacagtttctcgagcaggttgccgaatggcccgtacaggcgctggagtacaaatcgtttctgcgttttcgggtaggcaaaattcttgacgatctgtgtgcgaatcagctgcaaccattgctgttgaagaccctgctaaaccgtgctgaaggtgcgctgttgatcaatgcggtgggtatcgatgatgtggcgcaggcagatgagatggtgaagctggcaacggcggtagcgcatctgattggtcgctcaaatttcgatgcgatgagcggtcagtattacgcgcgtttcgtggtgaaaaatgtcgataactcagacagctatctgcgtcagccgcaccgcgtgatggaactgcacaacgacggcacgtatgtcgaagagatcaccgattacgtgctgatgatgaaaatcgatgagcaaaacatgcagggtggaaattcgttgctgctgcatctcgatgactgggaacatctggaccactatttccgccatccactggcgcgtcgcccgatgcgctttgccgcgccgccgagcaaaaacgtcagcaaagatgttttccatccagtgttcgacgttgatcaacagggtcgcccggtgatgcgctatatcgaccagttcgtccagccaaaagattttgaagaaggcgtgtggttgagcgagctttccgatgccattgaaaccagcaaaggcattctttctgtacccgttcccgttggcaaattcctgttgataaacaacctgttctggctgcacggtcgcgaccgctttactccgcacccggatctgcgccgtgaactgatgcgtcagcgtggctatttcgcttacgccactcaccactaccagacgcatcagtaagcgcaaaggaattgagcggatgtatgattttgtgattattggcggcggcatcatcggcatgtcgaccgccatgcaactgattgatgtttatccggatgcccgcattgcgttgctggaaaaagagtccggcccggcctgtcaccagacgggccacaacagcggcgtgatccatgccggggtctattacacgcccggcagcctgaaggcgcagttttgcctggcggggaaccgcgccaccaaagccttttgcgatcaaaacggcattcgctatgacaactgcggcaagatgctggtcgccacgtctcagctcgaaatggaacggatgcgcgccttatgggaacgcacagcggcgaacggtatcgagcgcgagtggataaacgccgtggaactgcgcgagcgcgaaccgaatatcaccgggcttggtggcatttttgtgccgtccagcggcattgtcagctaccgcgaagtcacagcggcaatggcaaaaatcttccaggccagaggcggcgagattatttataacgccgaagtcagcgccctcagtgagcataaaaacggcgtggtgatacgcacccgtcagggcggtgaatatgaagcatcgacgctgattagctgttccgggctgatggctgaccggctggtgaaaatgctcggcctcgaaccgggctttatcatctgcccgttccgtggtgagtatttccgccttgcgccggagcataaccagattgttaaccacctgatttaccccattcccgaccccgcgatgccatttttgggcgtgcatctcacccgcatgatcgacggcagcgtgaccgtcgggccaaacgcggtgctggctttcaaacgcgaaggctatcgcaagcgcgacttctcatttagtgacacgctggagattttgagctcgtcggggattcgccgggtgctgcaaaaccatctacgctcaggactgggcgagatgaaaaactcgctgtgcaaaagcggctacctgcggctggtgcaaaagtattgtccccggctttcgttaagcgatctccagccctggcccgccggtgtgcgggcgcaggcagtatcgccggacggcaagctgattgacgattttctgtttgtcaccaccccacgcacgatccacacctgcaatgcgccctccccggcagcgacatcagcaattcctattggtgcgcatattgtcagcaaggtacaaacgctgttggcaagccagagtaaccccggacgcacgctgcgagcggcacgtagtgtggatgccttacacgccgcatttaatcaataacctttgaaaacaggacgtaacaatgaaacttaacgacagtaacttattccgccagcaggcgttgattaacggggaatggctggacgccaacaatggcgggatcatcgacgtcaccaatccggcgaacggcgacaagctgggtagcgtgccgaaaatgggcgctgatgaaacccgcgccgctatcgacgccgccaaccgcgccctgcccgcctggcgtgcgctcaccgccaaagaacgcgccaacattctgcgcaactggttcaatttgatgatggagcatcaggacgatttagcgcgcctgatgaccctcgaacagggcaaaccactggccgaagcgaaaggcgaaatcagctacgctgcctcttttattgagtggtttgccgaagaaggcaaacgtatttatggcgataccattcccggtcatcaggccgataagcgcctgattgttatcaagcagccgattggcgttaccgcagctatcacgccgtggaacttcccggcggcgatgattacccgtaaagccggtccggcgctggcggcaggctgcaccatggtgctgaagcccgccagtcagacaccgttctctgcgctggcgctggcggagctggcgattcgcgcgggcattccggctggcgtgtttaacgtagtcaccggttcggcaggcgcggtcggtaatgaactgaccagcaacccgctggtacgcaaactgtcgtttaccggttcgaccgaaattggccgccagttaatggaacagtgcgcgaaagacatcaaaaaagtgtcgctggagctgggcggcaacgcgccgtttatcgtctttgacgatgccgatctcgataaagccgtggaaggcgcgctggcctcgaaattccgcaacgccgggcaaacctgcgtctgcgccaaccgtttatacgtgcaggacggcgtgtatgaccgctttgccgaaaaattgcagcaggcggtgagcaaactgcacatcggcgacgggctggataaaggcgtcaccatcgggccgctgatcgatgaaaaagcggtagcaaaagtggaagagcatattgccgatgcgctggagaaaggtgcgcgtgtggtttgcggcggtaaagcggatgaacgcggcggcaacttcttccagccgaccattctggtggacgtgccggccaacgccaaagtgtcgaaagaagagacgttcggccccctcgccccgctgttccgctttaaagatgaagccgatgtgattgcgcaagccaatgacaccgagtttggccttgccgcctatttctacgcccgtgatttaagccgcgtcttccgcgtgggcgaagcgctggagtacggcatcgtcggcatcaataccggcattatttccaatgaagtggccccgttcggcggcatcaaagcctcgggtctgggtcgtgaaggttcgaagtatggcatcgaagattacttagaaatcaaatatatgtgcatcggtctttaactggagaatgcgaatgaacagcaataaagagttaatgcagcgccgcagtcaggcgattccccgtggcgttgggcaaattcacccgattttcgctgaccgcgcggaaaactgccgggtgtgggacgttgaaggccgtgagtatcttgatttcgcgggcgggattgcggtgctcaataccgggcacctgcatccgaaggtggtggccgcagtggaagcgcagttgaaaaaactgtcgcacacctgcttccaggtgctggcttacgagccgtatctggagctgtgcgagattatgaatcagaaggtgccgggcgatttcgccaagaaaacgctgctggttacgaccggttccgaagcggtggaaaacgcggtaaaaatcgcccgcgccgccaccaaacgtagcggcaccatcgcttttagcggcgcgtatcacgggcgcacgcattacacgctggcgctgaccggcaaggtgaatccgtactctgcgggcatggggctgatgccgggtcatgtttatcgcgcgctttatccttgcccgctgcacggcataagcgaggatgacgctatcgccagcatccaccggatcttcaaaaatgatgccgcgccggaagatatcgccgccatcgtgattgagccggttcagggcgaaggcggtttctacgccgcgtcgccagcctttatgcagcgtttacgcgctctgtgtgacgagcacgggatcatgctgattgccgatgaagtgcagagcggcgcggggcgtaccggcacgctgtttgcgatggagcagatgggcgtggcgccggatcttaccacctttgcgaaatcgatcgcaggcggtttcccgctggcgggcgtcaccgggcgcgcggaagtgatggacgctgttgcaccgggcggtctgggcggcacctatgccggtaacccgattgcctgcgtggctgcgctggaagtgttgaaggtgttcgagcatgaaaatctgctgcaaaaagccaacgatctggggcagaagctaaaagacggattgctggcgatagccgaaaaacacccggagatcggcgacgtacgcgggctgggagcgatgattgccatcgagctgtttgaagatggcgatcacagcaaaccggacgcaaaactcaccgccgagatcgtggcacgcgcccgcgataagggcctgattcttctctcctgcggcccgtattacaacgtgctgcgcatccttgtaccgctcaccattgaagacgctcagatccgtcagggtctggagatcatcagccagtgttttgctgaggcgaagcagtagctatgtccgtttgtaagagttaaccgttgctaagggaatgataacgatgcagtaaaaaataataacgatgaggcgaacgacaaagttaaaaacgactgcggacagtcccctcgcccctctggagagagggttagggtgaggggtaaaacacgcggctaaaccctcccctggccctctccctaagggagagggagaaaaccctcccgctttcgtttttaagattttgttgaccgtctcaattaaacgcgtgacccggcgcgggaaatgtcggggcgctctcccaagtgacacactttcgagaggattcaggatggggcaatcatcgcaaccacatgagttaggcggcgggctgaaatcacgccacgtcaccatgttgtctattgccggtgttatcggcgcaagtctgtttgtcggttccagcgtcgccatcgccgaagcgggcccggcggtattactggcctatctgttcgccgggctactggtggttatgattatgcggatgttggcggaaatggcggttgccacgcccgataccggttcgttttccacctatgccgataaagccattggtcgctgggcgggctataccatcggctggttgtactggtggttttgggtactggttatcccgctggaagccaatatcgccgctatgatcctgcactcgtgggttccaggcattcccatctggttattttccctcgtcattacccttgccttaactggcagtaatttattaagcgttaaaaactacggcgaatttgagttctggctggcgctgtgcaaagtcatcgctatcctggcctttattttccttggtgcagtcgcaattagcggtttttacccttatgccgaagtgagcgggatctcaagattgtgggatagcggcggctttatgcccaacggtttcggtgcggtattaagcgcgatgttgatcaccatgttctcgtttatgggcgcagaaattgtcaccattgccgccgcggaatccgacacgccggaaaaacatattgtccgcgccaccaactcggttatctggcgtatttctatcttctatttgtgctctatttttgtcgtcgtggcattaataccgtggaatatgccggggctgaaagccgttggatcttatcgctcggttctggaattgctcaatattccccatgcgaaattaatcatggactgtgtgatattactttccgtaaccagttgcctgaactcggccctgtataccgcctcaaggatgctctactccttaagccgtcgcggtgatgctcccgcggtaatgggtaaaatcaaccgcagtaaaaccccgtacgtggcggtgttactctccaccggcgcggcattcttaacggtggtggtgaactattacgcgcctgcgaaggtatttaaatttctgatcgacagctccggcgctatcgccctgctggtttatttagtcatcgccgtttcacagttgcggatgcgcaaaattctgcgagcggaaggaagcgaaattcgcttgcgaatgtggctttatccctggctcacctggctggtcatcggctttattacctttgtgttggtagtgatgctattccgtccggcgcaacagttagaagtgatctccaccggcttattagcgatagggattatctgtaccgtgccaattatggctcgctggaaaaagctggtattgtggcaaaaaacacccgttcataatacgcgctgataatgatcaggagtcacaccatgaccattacgtctctggatggctatcgctggctgaagaacgatattattcgcggtaattttcaaccggatgaaaaattacggatgagtttgctgacatcgcgttatgcacttggcgttgggccgttgcgggaagcactttctcaactggtggcggaacggctggtcacggtggtgaatcaaaaagggtatcgggtggcgtctatgtcagagcaggagctgctcgatattttcgatgcccgcgccaatatggaagcgatgttagtgagtctggcgattgcccgcggtggcgatgagtgggaggcagacgttctcgcaaaagcgcatctgctcagtaagctggaagcctgtgacgccagcgagaaaatgcttgatgagtgggatctgcgtcatcaggcgtttcatacagcaattgtggcgggctgtggttctcactatttgctgcaaatgcgtgaacggttgtttgatctggcggcgcgctatcgatttatctggctgcggcgaacggtgctttcggtagaaatgctggaggataaacacgatcagcaccagaccctgactgcggcggtactggcgcgagataccgcgcgcgccagtgagttaatgcgccagcatttactgacgccaattcccattatccagcaggcgatggctggcaattaactactcttccggaatacgcaacacttgccccggataaattttatccgggctttttagcatcggtttattcgcttcgaagattttattgtacagattagcgttaccgtagacctgtttggaaatggcactcagagtgtcgccagacttaacggtataaaactggctggcagtggctggtgtcgccgttttcacctgatcatcaacactggcaataccggaaatattccccaccgcaacaaggattttctccttcgcctcctgactcaggccgtcaccagtgaccgtcgctttgccgtcggcaatttgaatgttcactttatcagcatcaggtataccggttttgctcagatgctcctgcaccttcttcgcctgatcgtctttatcgtgctgacctgtaaccgcgtcccagagtttttctccggcatctttcacaaaattgaacagacccatagctacctcattcgttaacggaaacactcagaaagtgtagcagaggaacgcggcgcgttaacgccgcgggggtgagcacaggtttaatcgcgggtttgcacccagaacgcgtgaatcaaaccggggatatacccaagcagtgtcagcagaatattaataatgaacgcccaaccgaaccctttaccgagcagcacgccgagcggcggtagaatgatggtgatgacgattctccagaaacccatatgtactccctataagaaaattactcattgtttaaaaagagattttatctcttaagcgtagtaattttagcggagcctgccagtttcagcttacgcttttactctcatttacgctgctgaggctggtatatgttgcatttttagtttagagcttacttaatttagaaaatacttaaataaatatgactgaactcgcgcaattacaggccagtgccgaacaggcagcggccttattgaaagcaatgagccatcctaaacgattgctgattctgtgcatgcttagcggttcccccggcaccagcgcgggagagctgacgcgcattaccggactgagtgcctctgcgacatcacagcatctcgctcgtatgcgggacgaagggcttatcgacagccaacgggatgcccaacgcattctatattccattaaaaatgaggcggtaaatgccattatcgccaccctgaaaaatgtctattgtccgtaaggagtcactatggctttgacaaccatttcgccgcatgatgcacaagaattaatcgcacgcggcgcaaagttaatcgatattcgtgacgctgatgaatatcttcgtgaacatattcctgaagcagatctggctccattatccgtgctggaacagtcaggtcttccacctaaattacgtcgcgagcaaattatattccactgccaggcaggtaaacgcaccagtaataacgccgataaattagcagcgattgccgcccccgcagaaatatttttactcgaagatgggattgatggctggaaaagagctggattgccagtagcggtaaataaatctcaacccttgccgttaatgcgccaggtgcagatcgctgcgggtggtttaatattaatcggcgttgtactgggttataccgtaaatagcggtttcttcttattaagtggctttgttggtgccgggttactgtttgcaggaatcagcggtttttgtggaatggcaaggttgttagataagatgccgtggaaccaacgagcttgagaagcgacgccggacgcgccctaaatagctgcgcggaatagtagatcactttgagggaacttagcccggattgtgcgatctgatcaatcgccaaatcaaaacaaatcaccaaccggactgagcaatgccgatcatagcaccaatttcccgtgacgaacgacgcctgatgcagaaagccatccataaaacacacgataaaaattatgcccgcagactgactgccatgctgatgctgcaccggggcgaccgtgtcagcgacgttgccagaacgctctgctgcgcccgttcctctgttggacgctggattaactggttcacgcagtcgggtgttgagggactgaaatcattacctgccgggcgtgcccgtcgctggccgtttgagcatatctgcacactgttacgtgagctggtaaaacattctcccggcgactttggctaccagcgttcacgctggagtacagaactgctggcaataaaaatcaatgagataaccggttgccagttaaatgccggaaccgttcgccgctggttgccgtctgcggggattgtgtggcgaagggctgcgccaactctgcgtatccgtgacccgcataaagatgaaaagatggcagcaatccataaagcactggacgaatgcagcgcagagcatccggtcttttatgaagatgaagtggatatccatcttaatcccaaaatcggtgcggactggcaactgcgcggacagcaaaaacgggtggtcacgccgggacagaatgaaaaatattatctggccggagcgctgcacagcgggacaggtaaagtcagctgtgtgggcggcaacagcaaaagttcggcgctgttcatcagcctgctgaagcggcttaaagcgacataccgtcgggcgaaaaccatcacgctgatcgtggacaactacattatccacaaaagccgggaaacacagagctggctgaaggagaacccgaagttcagggtcatttatcagccggtttactcgccatgggtgaatcatgttgaacggctatggcaggcacttcacgacacaataacgcgtaatcatcagtgcagctcaatgtggcaactgttgaaaaaagttcgccattttatggaaaccgtcagcccattccccggaggcaaacatgggctggcaaaagtgtagcggtattaagcgcagctatttagcagcgacatccggcctcagtaattagatcaggaaatcgtcgagagatttaccttctgccagcgcctgagcaattggcttcggtgtacggccctgaccggtccaggttttagtttcaccgttaacatcggtgaatttatatttcgccggacgcggctggcgttttttaccagcgcgtggtgcagcagcagagctattacccaataactcttccgggttaattccgtcagccttcatcagctccagccaggtgctaattttttcctgacgctcagccagttcacgctgctgctgttcttcttcttcacgtctttctttagtgacaaccctgaatttttcgagcatttcttcaagaacgtcaatggagaattcgcgagccatcgcacggagggtgcgaatgttatttaaactttgtaacattacggacataataaagaaaaccttttaacgccaaaacaaaaaagtatttcgtcgcgtagtgtaagcgatcacttattatatttccacaaaatttaatctatttacagtcttgcgcgagattatttcagctgttattttctgaaactctcagaataatttcaagattatatattagccattttgatgagtaatttagattattggtgaacagaacggcgctctctgctcgctaattccgcaagcctgacaaaaccgaagtgaataaaaatgcaatataacagaataaaagaacccccgttactttattcgtaccccttataatggggtgttagccagccagacccggcatgattactgcccccagtcgtccatgatccggggggtgatgtcaccgggtctggtggggcgctggtaaccgctaataggggtcaggtcaggcacttttgccgggaccgtctgtaacgtggatgctggtacctgctccccgtggttatctggttaacccatatacaagggagacagaatgaccgaatccagcgattacgaatccgtccaggtctttatcggcgttgatgtcggtaaagatacgcatcacgctgttgccattaatcgttcaggtaaacgcctgttcgataaagcattacccaacgacgaaaacaaactcaggtcgctaatatctgacctgaaacaacatggtcagatactgctggttgttgatcagccagctaccatcggtgcgttacctgtcgccgttgcccgctcagaaggagtccttgtcggatacctccctggactggccatgcgccgcatagccgacttacacgccggtgaagctaaaactgatgctcgtgacgctgccatcattgccgaagctgcccgtaccctgcctcacgcgctacgcacgctgaaactggctgacgagcaaatcgccgaactctccatgctctgcggcttcgatgatgatcttgccgcacagacaacgcaggccagcaaccgtatccgcggccttctgacccagatacatccggcactggagcgcgttctcggtccgagacttgagcacccggcggtactcgatcttctccagcgatatccctcaccagaaaaactcgcttcgctgggcttcgctgggtgagaagaagctggcagcccagctctgcaaacttgcgcctcgtctgggtaaacgccttgcagcagacatagctcaggcactggccgaacaaaccgtcgtcgttcccggcacgaatgccgctgccgtagtactgccacgtctggcactccagctcatcacgctgcgtaagcaaagagacgaggtggcgcttgaggtagaacagcgagttcttgctcaccctctttacccggtcctgaccagtatgcccggagtcggtgtcaggaccgcagccagactcctcaccgaggtcgcctgccgcgccttcgcctctgccgcacatctcgctgcttatgctggccttgcgccggtaactcggcgatccggctcgtcaatacgcggtgagcatccctcgcgacggggtaataaagctctcaaacgggcgttgttcctgtcggccttcgccgcgctcagggatccgctctccagggcttactacacccgcaaaatgagtcagggaaaacgacacaatcaggcgcttatcgccctggcgagacgacgctgcgacgttctgttcgccatgatgcgcgacgggactttttataccccgcaggggtcataacatgcttgacaacttaataggggcacccccctcactggtgctttctgctgttaatgtacattttctggcatcaaaaatgctgtaaatgacacggtcacgacatacaccgaattctctacgcttatagcgttacctcacccccaaactttcattagtgaaattaaaggcaaggtcatatctaattgatttaattgaaaataaatcatatcggcatgtaaaaatccacaatgtacaaaaaacgagccgttacggaatattttatctacaaaaactgactaaataaaaatttttcactaattgaatagtcatagccagcgatatacgctatgcgaaaatgcagatggcaatgagatccactgctttcatctccattaacatcccattacgcttttattaaggagcattagcatgttctcaccgcagtcacgcttgcgtcatgcagttgcagatacgttcgcgatggttgtttactgttctgtcgtgaacatgtgtattgaagttttcctctccggaatgagcttcgaacagtctttttattccagattggtagcgattccggtgaacatcttaattgcatggccatacggtatgtaccgcgatctatttatgcgcgcggcacgcaaagttagcccgtcgggctggataaaaaatctggctgatatcctggcttatgtgacgttccagtcaccggtgtatgtggcgatcttgttagtggtgggcgcagactggcatcagattatggcggcggtcagttcaaacatcgttgtttcgatgttgatgggggcggtttatggctacttcctcgattattgccgccgactgtttaaagtcagccattaccagcaggtaaaagcctgactcttcttttcgcgactggcatcgccagtcgcgtctttaactggcttcgccaaataaaccattcaaataacgttcaagcgcaacacgcgaactgaagccatgcgggataccgtaatgctcgtgtcgctcgcctgctaaatagagcggaaattgttgataatgatcgcaagttttaatatcggaagcgggttcagccagtgtcgaactacgttcttttaatgttggatgaattaccagtgcggtacgtcccattcgcgcttcgcgattaacatagacataattttccccacggcggtaaccataagctttctgggttaccacatcgacagtaaaaccgactttttcaagtacgcgcgccacctcgtctggtcgtaaatacatatttgatcctcgttattatcaaccgcgggcctaccttacctgattgcgcattcacaacgctttcagaaaagtccataaagccgcgatgaacctcagttaagaaaattatggtctacactgaaaattacatcgaattctaatgggggatcatatgtttaaccgaccgaaccgcaacgacgttgatgatggcgtgcaggatatccagaatgatgtcaatcaattagctgacagcctcgaatctgtattgaagtcctggggcagcgacgccaaaggggaagctgaagccgcacgcagtaaagctcaggcattgctgaaagaaaccagggcgcgaatgcatggtcgtactcgcgtccagcaagccgcacgcgatgccgttggctgcgcggattcttttgttcgtgaaagaccctggtgtagcgtgggtacagcagctgcggtaggtatttttatcggcgcactgttaagcatgcgcaaatcgtagtgcaaaaatgataataaatacgcgtctttaaccccgaagcctgtcttcggggtttctttttgcctggtgaatcacaaaaatccccctcccccgtcacgctcatatctagggtaatttcgatcactatttgctatatattgtgtggttgaatcttttttcaactacatctagtatctctgtatcaacagagagacaacccgacgcgtatcatcgcgccgtatcttcattttaaacggaaatacgaatcatgcgcataactatttacactcgtaacgattgcgttcagtgccacgccaccaaacgggcgatggaaaaccggggctttgattttgaaatgattaatgtcgatcgcgttcctgaagcagcggaagcgttgcgtgctcagggctttcgtcagttgccggtagtgattgctggcgatcttagctggtctggtttccgtccggacatgattaaccgtctgcatccagcgccacacgcggccagtgcatgagccagctcgtctacttctccagcagctccgaaaacacgcagcgttttatcgaacgtttaggtctgcccgcggtgcgcatcccgctcaatgagcgggaacggattcaggtagacgagccttacatcctgatcgtgccctcttacggcggcggcggtacggctggcgcggtgccacgataggtaattcgctttttaaacgacgagcacaaccgggcgttgcttcgcggcgttattgcttctggtaatcgcaactttggtgaggcgtatggccgcgccggagatgtgattgcccggaaatgcggcgtgccgtggctgtaccgttttgaactcatgggtacgcaaagcgatatcgaaaacgttcgtaaaggagtaaccgaattttggcaacgacaaccgcagaatgcctgacgcaggaaacgatggattaccacgcgctgaatgcgatgcttaacctctacgatagcgcaggtcgcattcagttcgataaagaccgccaggccgttgacgcctttatggcgacgcatgtgcgtccgaacagtgtgaccttcagtagccagcagcagcgcctgaactggctggtcaacgaaggttactatgatgaaagcgttcttaatcgctactctcgcgactttgtcattacgctgtttgcccacgcacacaccagcggttttcgtttccagacattcctcggggcatggaagttttacaccagctatacgttgaagacattcgacggtaaacgttatctggaagattttgccgatcgagtcacgatggtggcgctgacgctggcacaaggcgatgcgacgctggcgttgcaactgaccgatgaaatgctgtcaggacgctttcagccagccacgccgacattcctcaactgcggtaagcagcagcgcggcgaactggtttcctgttttctgctgcgtattgaagacaatatggagtcgattggccgggcggtaaattccgcactgcaactgtcgaaacgcggcggcggcgtggcatttttgctgtcgaatctgcgagaagcgggcgcgccaattaaacgtattgaaaatcaatcttctggcgtaattccggtgatgaaaatgctggaagacgcattttcctatgccaaccaactcggcgcgcgtcagggggcaggtgcagtctatttacatgctcatcatcccgatattctgcgttttctcgatacaaaacgggaaaatgccgacgaaaaaatccgcattaaaacactgtcgctgggcgtggtgatcccggatatcactttccatctggcaaaagagaatgcgcagatggcgctgttttcgccctatgacgttgagcgagtttatggcaagccgtttgccgatatcgccatcagcgaacactatgacgaactggttgccgatgaacgcatccgcaaaaaatacctcaacgcccgtgatttcttccagcggctggcagaaatccagtttgagtccggctatccctacatcatgtatgaagacacggtaaaccgtgctaaccctgtcgccgggcgcataaatatgagtaatctctgctcagagattttgcaggtcaactgtgcctcagagtatgacgagaatctcgactatgcccgcacaggccatgatatctcctgcaatttaggttcgttgaatattgcgcacaccatggattcccccgattttgcccgcacggtagagactgccgtgcgcggtttaacggcggtgtcagatatgagtcatatccgcagcgtgccgtccatcgaagccggaaatgccgcctcacacgccatcggactggggcagatgaatttacacggctatctggcgcgagaaggcatcgcttatggttcgccggaagcactggatttcaccaatctctatttctatgccatcacctggcacgcactgcgtacctcgatgttgctggcgcgcgaacgcggtgaaaccttcgccgggttcaaacagtcacgttatgccagtggtgaatattttagccaatatctgcaaggtaactggcagccgaaaacggcgaaagttggcgaactgtttgcccgcagcggtattacgttacctacccgtgagatgtgggcgcaactgcgcgacgacgtgatgcgctacggcatttacaaccagaatcttcaggcggtgccgccaaccggttctatctcttatatcaaccatgctacgtcgagtattcatccgattgtggcgaaagtagagatacgcaaagagggcaaaacaggacgcgtttactaccctgccccgtttatgactaacgaaaatctggcgctgtatcaggatgcttacgaaatcggcgcagaaaagatcatcgacacctacgcggaagcgactcgccatgtcgatcagggtttgtcgctgacgctgtttttccccgataccgccaccactcgcgatatcaacaaagcgcagatttacgcctggcgcaaaggtatcaaaacgctctattacattcgcctgcgtcagatggcgctggaaggcactgaaattgaaggctgcgtctcctgtgcactttaaggaatatctatgaaactctcacgtatcagcgccatcaactggaacaagatatctgacgataaagatctggaggtgtggaatcgcctgaccagcaatttctggctaccagaaaaggtgccgctgtcgaacgatattcctgcctggcagacattaactgtcgtagaacaacaactgacgatgcgcgtttttactggcctgacgctgctcgacacgctgcaaaatgttatcggcgcgccttcgctgatgcccgatgcactcacgcctcatgaagaagcggtattatcgaatatcagctttatggaagcggttcatgcccgctcttacagttcgattttctcgacgctgtgccagaccaaagatgtcgatgccgcctacgcctggagtgaagaaaacgcaccgttgcagcgaaaagctcagattattcagcaacattatcgcggtgatgatccgctgaaaaagaaaatcgccagtgtgtttcttgaatcttttttgttctattccggtttctggctgccgatgtatttttccagccgcggaaagctgaccaataccgcagacctgatccgtctgattatccgtgatgaagcagtccacggttactacataggctataaatatcagaaaaacatggaaaagatatctctgggacaacgtgaagagttgaagagtttcgccttcgatttgttgctggaactctacgacaacgagctgcaatacaccgatgagctgtacgccgaaaccccgtgggctgacgatgtgaaagcgtttctctgttacaacgccaataaggctttgatgaatctgggctacgaacctttatttcccgcagaaatggcggaagtgaatccggcaatcctcgccgcgctttcgccgaatgccgatgaaaatcacgatttcttttccggttcaggctcctcttatgtgatggggaaagcggttgaaacagaagatgaagactggaatttctgagggtgttattttcaaaaatatcactacccgcgacagggaaataattcccgccaaatagctttttatcacgcaaatattttgtggtgatctacactgatactctgttgcattattcgcctgaaaccacaatattcaggcgttttttcgctatctttgacaaaaaatatcaacttttctcgatttgctctcagcccttatatcacgggaaattccggcgatttgctcgcatcaatattcatgccacatttgccatcaggggttgcctcagattctcagtatgttagggtagaaaaaagtaactatttccattgggtaatatatcgacataaacaaataacaggaatctttctattgcatggcaattaaattagaaattaaaaacctttataaaatatttggtgagcatccacagcgagcattcaaatatatcgaacaaggactttcaaaagaacaaattctggaaaaaactgggctatcgcttggcgtaaaagacgccagtctggccattgaagaaggcgagatatttgtcatcatgggattatccggctcgggtaaatccacaatggtacgccttctcaatcgcctgattgaacccacccgcgggcaagtgctgattgatggtgtggatattgccaaaatatccgatgccaaactccgtgaggtgcgcagaaaaaagattgcgatggtcttccagtcctttgccttaatgccgcatatgaccgtgctggacaatactgcgttcggtatggaattggccggaattaatgccgaagaacgccgggaaaaagcccttgatgcactgcgtcaggtcgggctggaaaattatgcccacagctacccggatgaactctctggcgggatgcgtcaacgtgtgggattagcccgcgcgttagcgattaatccggatattttattaatggacgaagccttctcggcgctcgatccattaattcgcaccgagatgcaggatgagctggtaaaattacaggcgaaacatcagcgcaccattgtctttatttcccacgatctcgatgaagccatgcgtattggcgaccgaattgccattatgcaaaatggtgaagtggtacaggtcggcacaccggatgaaattctcaataatccggcgaatgattatgtccgtaccttcttccgtggcgttgatattagtcaggtattcagtgcgaaagatattgcccgccggacaccgaatggcttaattcgtaaaacccctggcttcggcccacgttcggcactgaaattattgcaggatgaagatcgcgaatatggctacgttatcgaacgcggtaataagtttgtcggcgcagtctccatcgattcgcttaaaaccgcgttaacgcagcagcaaggtcttgatgcggcgctgattgatgcgccgttagcagtcgatgcacaaacgcctcttagcgagttgctctctcatgtcggacaggcaccctgtgcggtgcccgtggtcgacgaggaccaacagtatgtcggcatcatttcgaaaggaatgctgctgcgcgctttagatcgtgagggggtaaataatggctgatcaaaataatccgtgggataccacgccagcggcggacagtgccgcgcaatccgcagacgcctggggtacaccgacgactgcaccgactgacggcggtggtgctgactggctgaccagtacgcctgcgccaaacgtcgagcattttaatattctcgatccgttccataaaacgctgatcccgctcgacagttgggtcactgaagggatcgactgggttgttacccatttccgtcccgtcttccagggcgtgcgcgttccggttgattatatcctcaacagtttccagcaattgctgctgggtatgccagcgccagtggcgattatcgttttcgctctcatcgcctggcagatttccggggtcggaatgggcgtggcgacgctggtttcgctgattgccatcggcgcaatcggtgcctggtcgcaggcaatggtgactctggcgctggtgttaaccgccctgctgttctgtatcgtcatcggtttgccgttggggatatggctggcgagaagtccgcgagcggcgaaaattattcgtccactgcttgatgccatgcagaccacgccagcgtttgtttatctggtaccaatcgtcatgctgtttggtatcggtaacgtgccgggcgtagtggtgacgatcatctttgctctgccgccgattatccgtctgacgattctggggattaaccaggttccggcggatctgattgaagcctcgcgctcattcggtgccagcccgcgccagatgctgttcaaagttcagttaccgctggcgatgccgaccattatggcgggcgttaaccagacgctgatgctggctctttctatggtggtcatcgcctcgatgattgccgtcggcgggctgggtcagatggtacttcgcggtatcggtcgtctggatatgggccttgccaccgttggcggcgtcgggattgtgatcctcgccattatcctcgaccgcctgacgcaggccgttgggcgcgactcacgcagtcgcggcaaccgtcgctggtacaccactggccctgtcggtctgctgacccgcccattcattaagtaactctgcacttgcccggtaacgccgggcattatcaccctgccaaaaaaaggaataacaatgcgacatagcgtactttttgcgacagcgtttgccacgcttatctctacacaaacttttgcagccgatctgccgggcaaaggcattactgttaatccagttcagagcaccatcactgaagaaaccttccagacgctgctggtcagtcgtgcactggagaaattaggttataccgtcaataaacccagcgaagtggattacaacgttggctacacctcacttgcttccggcgatgcaaccttcaccgccgtgaactggacgccgctgcatgacaacatgtacgaagctgccggtggcgataagaaattttattgtgaaggggtattcgttaacggcgcggcacagggttacctgatcgataagaaaaccgccgaccagtacaaaatcaccaacatcgcacaactgaaagatccgaagatcgccaaactgttcgataccaacggcgacggtaaagcggatttaaccggctgtaacccaggctggggctgcgaaggtgcgatcaaccaccagcttgccgcgtatgaactgaccaacaccgtgacgcataatcaggggaactacgcagcgatgatggccgacaccatcagtcgctacaaagagggcaaaccggtgttttattacacctggacgccgtactgggtgagtaatgagctgaagccagggaaagatgtggtctggttgcaggtgccgttctccgcactgccgggcgataaaaacgccgataccaaactgccgaatggtgcgaattatggcttcccggtcagcaccatgcatatcgttgccaacaaagcctgggccgagaaaaacccggcagcagcgaaactttttgccattatgcagttgccagtggcagatattaacgcccagaacgccattatgcatgacggcaaagcctcagaaggcgatattcagggccatgttgatggttggatcaaagcccaccagcagcagttcgatggctgggtgaatgaggcgctggcagcgcagaagtaatttttattcgggcggataagtcgtttttgcctcatccgccattctgtgcacaatgcctgatgcgacgctggcgcgtcttatcatgcctacaaaatacactcattccgtatggcggataaggcgttttcgccgcatccgccgttctgtgcacaatgcctgatgcgacgctggcgcgtcttatcatgcctacaaaccacatcgcacatttcaacaagctatctttcgcccccattcatcaacatccgctattattgatttccagcttaatcatcacctgatgaacaaaaataatgactaaacctaatcatgagcttagcccggcgctgatcgtgctgatgtctatcgccaccggtcaggcggtagccagtaactattacgcccagccattgctcgacaccatcgcgcgtaacttttccctttccgccagttcggcaggctttattgttaccgccgcgcagttgggctatgcagcaggtctgctgtttcttgttcccctcggtgatatgtttgaacgccgccgcctgattgtctcgatgaccttactggcggcaggcggcatgttaatcactgccagcagtcagtcgctggcgatgatgatcctcggtacggcattaaccggtttattctcagtcgtggcacaaattctggttccgctggcagcgacgctggcttcaccggataaacgcggcaaagtggttggcaccattatgagcggtctgctgttggggatcttgctggcacgaaccgttgccgggttactggcaaacctcggcggctggcgcaccgtcttttgggttgcctcggtgttaatggcactgatggcgctagcattatggcgtggtctgccacaaatgaaatcagaaacccacctcaactacccacagttgttaggttccgttttcagcatgtttatcagcgataagatcctccgcacccgcgcattgctgggctgcctgacctttgccaacttcagcattctctggacctcaatggcctttttgcttgccgctccaccttttaactacagcgatggtgtcattggtctgtttggacttgcgggagctgccggagcgttgggcgctcgtccggcgggcggttttgccgataagggtaaatcgcaccacaccacaactttcggtctgctgctgctattactttcatggctggcgatctggtttggtcacacttccgtactggcgctgattatcggcatcctggtgctggatctcaccgtacagggcgtgcatatcactaaccagacggtaatttatcgaatacaccctgatgcgcgtaatcgcctgaccgcaggttacatgaccagctactttattggcggtgccgccggttcgctaatttcagcctcagcctggcaacatggcggttgggctggcgtttgtctggctggcgcgacgattgccctagttaacttactggtctggtggcgaggttttcatcgtcaggaagccgcaaattaagcaatcagcaaccgttttcgtggttttacacttataagggtgttaagaagcccatcagtctgataaggttaagatattcattcagtctatttataatattaacaatcgttaagcgtacactctatggaaagccctactccacagcctgctcctggttcggcgaccttcatggaaggatgcaaagacagtttaccgattgttattagttatattccggtggcctttgcgttcggtctgaatgcgacccgtctgggattctctcctctcgaaagcgtttttttctcctgcatcatttatgcaggcgcgagccagttcgtcattaccgcgatgctggcagccgggagtagtttgtgggttgctgcactgaccgtcatggcaatggatgttcgccatgtgttgtatggcccgtcactgcgtagccgtattattcagcgtctgcaaaaatcgaaaaccgccctgtgggcgtttggcctgacggatgaggtttttgccgccgcaacagcaaaactggtacgcaataatcgccgctggagcgagaactggatgatcggcattgccttcagttcatggtcatcgtgggtatttggtacggtaataggggcattctccggcagcggcttgctgcaaggttatcccgccgttgaagcagcattaggttttatgcttccggcactctttatgagtttcctgctcgcctctttccagcgcaaacaatctctttgcgttaccgcagcgttagttggtgcccttgcaggcgtaacgctattttctattcccgtcgccattctggcaggcattgtctgtggctgcctcactgcgttaatccaggcattctggcaaggagcgcccgatgagctatgaggttctgctgcttgggttactggttggcgcggcgaattattgcttccgctatttgccgctgcgcctgcgtgtgggtaatgcccgcccaaccaaacgtggcgcggtaggtattttgctcgacaccattggcatcgcctcgatatgcgctctgctggttgtctctaccgcaccagaagtgatgcacgatacacgccgtttcgtgcccacgctggtcggcttcgcggtactgggtgccagtttctataaaacacgcagcattatcatcccaacactgcttagtgcgctggcctatgggctcgcctggaaagtgatggcgattatataacccacaagaatcatttttctaaaacaatacatttactttatttgtcactgtcgttactatatcggctgaaattaatgaggtcatacccaaatggatagttcgtttacgcccattgaacaaatgctaaaatttcgcgccagccgccacgaagattttccttatcaggagatccttctgactcgtctttgcatgcacatgcaaagcaagctgctggagaaccgcaataaaatgctgaaggctcaggggattaacgagacgttgtttatggcgttgattacgctggagtctcaggaaaaccacagtattcagccttctgaattaagttgtgctcttggatcatcccgtaccaacgcgacgcgtattgccgatgaactggaaaaacgcggttggatcgaacgtcgtgaaagcgataacgatcgccgctgcctgcatctgcaattaacggaaaaaggtcacgagtttttgcgcgaggttttaccaccgcagcataactgcctgcatcaactctggtccgcgctcagcacaacagaaaaagatcagctcgagcaaatcacccgcaaattgctctcccgtctcgaccagatggaacaagacggtgtggttctcgaagcgatgagctaacgcgtcatctcgctcaaaaatccagatttataaaagaaaaaatgaccggccagcatcgcaacatgctggcctttttggcaagcaggtcggctcagccgatgagttaagaagatcgtggagaacaatatgagcgcaaatgcggagactcaaaccccgcagcaaccggtaaagaagagcggcaaacgtaagcgtctgctcctccttctcaccttgctctttataattattgccgtagcgatagggatttattgttttttggtactgcgtcatttcgaagaaaccgatgacgcatacgtggcagggaatcagattcaaattatgtctcaggtgtctggcagcgtgacgaaagtctgggccgataacaccgattttgtaaaagaaggcgacgtgctggtcactctcgacccgacagatgctcgccaggcgtttgaaaaagccaaaactgcactggcttccagcgttcgccaaacccaccagctgatgattaacagcaaacagttgcaggcgaatattgaggtgcagaaaatcgccctcgcaaaagcacaaagcgactacaaccgccgtgtgccgctgggcaatgccaacctgattggtcgcgaagagctgcaacacgcccgcgacgccgtcaccagtgcccaggcgcaactggacgtcgctattcaacaatacaatgccaatcaggcgatgattctggggactaaactggaagatcagcctgccgtgcaacaggctgccaccgaagtacgtaacgcctggctggcgctggagcgtacccgtattgtcagtccgatgaccggttatgtctcccgccgcgcggtacagcctggggcgcaaattagcccaacgacgccgctgatggcggtcgttccagccaccaatatgtgggtggatgccaactttaaagagacgcagattgccaatatgcgtatcggtcagccggtcactatcaccacggatatttacggcgatgatgtgaaatacaccggtaaagtggttggtctggatatgggcacaggtagcgcattctcactgcttccggcgcaaaatgcgaccggtaactggatcaaagtcgttcagcgtctacctgtgcgtatcgaactggaccagaaacagctggagcaatacccgctgcgcattggtttgtccacactggtgagcgtcaataccactaaccgtgacggtcaggtactggcaaataaagtacgttcaacaccggtcgcggtaagtaccgcgcgtgaaatcagcctggcacctgtcaataaactgatcgacgatatcgtaaaagctaacgctggctaatccagaggtgcgtgtgatgcaacagcaaaaaccgctggaaggcgcgcaactggtcattatgacgattgcgctgtcactggcgacattcatgcaggtgctggactccaccattgctaacgtggcgatccccactatcgccgggaatctgggctcatcgctcagccagggaacgtgggtaatcacttctttcggggtggcgaatgccatctcgatcccgcttaccggctggctggcaaagcgcgtcggggaagtgaaactgttcctttggtccaccatcgcctttgctattgcgtcgtgggcgtgtggtgtctccagcagcctgaatatgctgatcttcttccgcgtgattcaggggattgtcgccgggccgttgatcccgctttcgcaaagtctattgctgaataactacccgccagccaaacgctcgatcgcgctggcgttgtggtcgatgacggtgattgtcgcgccaatttgcggcccgatcctcggcggttatatcagcgataattaccactggggctggatattcttcatcaacgtgccgattggcgtggcggtggtgttgatgacactgcaaactctgcgcggacgtgaaacccgcaccgaacggcggcggattgatgccgtggggctggcactgctggttattggtatcggcagcctgcagattatgctcgaccgcggtaaagagctggactggttttcatcacaggaaattatcatccttaccgtggtggcggtggtggctatctgcttcctgattgtctgggagctgaccgacgataacccgatagtcgatctgtcgttgtttaagtcgcgcaacttcaccatcggctgcttgtgtatcagcctcgcgtatatgctctacttcggcgctattgttctgctgccgcagttgttgcaggaggtctacggttacacggcgacctgggcaggtttggcctctgcgccggtagggattattccggtgatcctgtcgccgattatcggccgcttcgcgcataaactggatatgcggcggctggtaaccttcagctttattatgtatgccgtctgcttctactggcgtgcctatacctttgaaccaggtatggattttggcgcgtcggcctggccgcagtttatccaggggtttgcggtggcctgcttctttatgccgctgaccaccattacgctgtctggtttgccaccggaacgactggcggcggcatcgagcctctctaactttacgcgaacgctggcggggtctatcggcacgtcgataaccacgaccatgtggaccaaccgcgagtcgatgcaccatgcgcagttgactgagtcggtaaacccgttcaacccgaatgcccaggcgatgtacagtcaactggaagggcttgggatgacgcaacagcaggcatcaggctggattgcccagcagatcaccaatcaggggctgattatttccgccaatgagatcttctggatgtcagccgggatattcctcgtactgctggggctggtgtggtttgctaaaccgccatttggcgcaggtggcggtggcggcggtgcgcactaagtacaactaagccagttcatttgaactggcttttttcaattaattgtgaagatagtttactgactagatgtgcagttcctgcaacttctctttcggcagtgccagttcttcgttgctgttgatgcgtacgtcacgttccagaatgctacgcgcaatatcctgcgcttcctgcaacgagtgcatctggtaagtgccacactggtagacgttcagttccgggatctgattctgatcctgcactttcagcacgtcttccattgccgctttccaggcatcagcaacacgctgctcatctggcgtaccaatcagactcatataaaaaccggtgcggcagcccattggcgagatatcgataatctctacaccattaccgttaagatggttacgcataaaaccagcaaacaggtgctccagggtatggatccctctttctggcatcacttctttgttcggcacgcagaagcgcagatcgaacacggtgattgcgtcgccatgcggggtgttcattgttttcgccacccgaactgcaggcgcttccatccgggtatgatcgactgtgaagctatctaacaacggcatttagccacctccggtaatttttttaaaaattttctgaactctttcttcccaggcgagtctgagtatatgaaagacgcgcatttgttatcatcatccctgaattcagagatgaaattttggccactcacgagtggcctttttcttttctgtcaggtgtgtttttccagccacaccgcaaacggttcggtatcagcggtttccatttcctgctgacggcgttcagatgcctcgcgctcggctacaaaatcctcttcgcgcagaatttccagcggctcttcacgcagcagattacggtaggcttctgcaaacgctttgcctgttccgccaataccagtatcaatcatagaccttaagatacgggcagagaaagtcagatcgggattatcgaagcaggcaaccagttcatcacacactttctgatacgcgtcgccgccgttaatgctatccagcgtttgcgcgacgcgtttcagatcgcggaacagatctttacccacctgcagtaacgggaactgcgcggtttcgcagccgatacccagcgtcaggcccggtttgcgaccttcaaggatcacccggttccagttaacgcgcgtacaggcaagttcgctactgctcatttccggtgcatcagccagcgcacaccagaccataaacaggtcgaggaatcgcacctgctgttcatctacaccaatcggcgagaacgggttgatgtccagcgaacgcacttcaatatattcaatgccgccacgtaacagcgcatcagaaggtgactcgccgctgcgggtaacgcgttttggacgaatcggcgcatacagttcgttttcaatctgcagcacgttgctattgatttgcagcctcttaccgtctttctcaataccaatcttcgcgtactcttccgatggcgttttgattgcctgtttaaggcccgctacgtactcgtaaagatcgttgaaggtaataccaagattgctttgcgatttattggtatagccgagatcgctcaaacgaagagaggtcgcatacggcaggtaatacataccgcactcggttttctcaaacggcagcgacgttggttttccttgcaggaaagaagaacaaatcgccggagatgcaccaaacagataaggaatgacccaaccgaaacgatagtaattgcggataacgcggaaatagcccgcagaaattttctctttggcatcagcgcccgagatatcaccgcacttcgcttgccagaatgccattggcaaagagaaattgtagtgcacgccggaaatggtttgcatcagcgcgccgtagcgatttttcagcccttcacgatacagcgttttaaagcgtccggtgttagaagtgccgtactgtgccagttcgatgtcctgaccttctgcgatgtagcatggcatacttaacggccacatccgctcatcgcccatattgcgcgccgtataacgatgcagatcgcgcataaaggtcagcatatgttcaatatcaccatccactggtgtaatgaattccagcaatgcttccgcaaaatcggtagtaatccatttgtgcgtcagtgcggaacctaatgcttcaggatgacctgttgttgccagtgtgccatcagcattaacacgcaaagtttcgcgctccagcccacgctgtatcccctttaacgcctgaggatgtttttccagccaggccagcgcctgtgatacgtccgggatcaaattgacctcccgcctgtcaaaatcgttttaattagcataactgtaatggtgaccatatgtgcaggcctacaattagtgccaccacatcatgccctgaacggtcgctgctgcaactgcaacatagcgtaacgctttaccaaggcacaaaaaaaagattaccggtccccacgagatgcgcatccatcccgctaacagacacagtaaatcgccaaccacgggcatccagcttaataatagcgtgactgcaccatagcgtttcagccagccgatagctttctcttgccagcgcgatgttttacgcaatggaaagaaacgcccaaggataacgttagttaaccctccaaggctattacccattgttgctgttaaaactaaaacccagggatgactgatcccggaaagcaacattgccaccagcacgacttcggagttgccgggtaatagtgtagcgctgagaaaactactggcaaacaacgagaaaagcgataacgcttcactcacagcaagcgaacgtccacagcgtccatacctgcggcacgggccgcctgaataccgaaatcggcatcttcaaagaccacacactgcgtcggttgcacgcccatacgctgcgcgcacaacaaaaatgtgtctggcgcgggtttatggtgtttgacgtgatcggcagcgacgacggcgtcaaaataatggcgtaatcccaggtgcgccagcaatgcctcagcgatggcgctttcactccccgttcctacagccattgggcgacgaccatgccaacttttcaccacatcaacaagaggaagcggttcgacgctatccagcagcatacttcttactgcttctgttttttcacgcgctaacgcatgcgggtcgagatcggcctgattcagctcaataattgcctgagcaatacgccaggtgggcgatccattaagcgcaatcatcgcctgaatatcgtactgaagaccgtagtgccctaatacttcgcgccacgctttacggtgcgtaggctccgtatccaggattgtgccatccatatcaaaaattaaacctgcataacgctcgtacatggtcttctcgcaagtcgaaaaatatgacgctactttagcgtaattgcttgattttgtcgctgatggcgaaggagaagaaaattcaggaaatggataaaggagttatttagaaatgagatatttttgaaggaaattttttggagaagatggtgcatccgggaggatgactcactgacgttcgcccttcgggccgttgctggcgcaacgttatccttcctggtgcctgcggttaataccgctatctcttcgataccttcattgctgaaggttacggagaatatggtgcatccgggaggattcgaacctccgaccgctcggttcgtagccgagtactctatccagctgagctacggatgcatcgggaaaacttattctactgctgatattgataccgctactaaagccatatcaattaagagatggtgcatccgggaggattactcgccttgcggctcgcccttcgggccgttgctaaagcaacgttatcatccctggtgcctgcggttaattccgctacctcttcgataccttcattgctgaagatttcggagaatatggtgcatccgggaggattcgaacctccgaccgctcggttcgtagccgagtactctatccagctgagctacggatgcatcgggaaaatttattttactgctgatattgataccgctactaaagccatatcaagtaagagatggtgcatccgggaggattcgaacctccgaccgctcggttcgtagccgagtactctatccagctgagctacggatgcaaatggcggtgaggcggggattcgaaccccggatgcagcttttgaccgcatactcccttagcaggggagcgccttcagcctctcggccacctcaccacacgcctcttacgagtgcttcgaagaacttgtttatcgctcatcgtcgctgcgtggcgcacatattactttctgagacttataagtcaaacaatttttcccacacttttatcgtttgcacacttcacgctcaattagtctgtaaaaacgtcaaaaagagtgttttatctacagaaaaacggaggtctggcagatagcagtaatgcaaaaaaatggagacttaagttgaatgaacgggagtaaagcgaaaagactatagagtgaaggagaaattttgagggtgcgtctcaccgataaagatgagacgcggaaagattagtaactggactgctgggatttttcagcctggatacgctggtagatctcttcacggtgaacagaaacttccttcggggcatttacgccaatacgtacctggttgccctttacccctaaaactgtcacggtgacctcatccccaatcatgagggtctcaccaactcgacgagtcagaatcagcattctttgctccttgaaagattaaaagagtcgggtctctctgtatcccggcattatccatcatataacgccaaaaagtaagcaatgacaaacacattacatgtaagcagtcatggcattacattctgttaaacctaagtttagccgatatacacaacttcaacctgactttatcgttgtcgatagcgttaatgcgaatgccgtgaagcgagtccacggcattgcctgacgcttatattattgcaatttcgcgctgacccagcctttcacactggctaacgctgcaggtaaggccgcagcatccgtaccaccggcttgcgccatgtcaggacgtccaccacccttgccgcccacctgctgagcgaccataccaatcagttcccctgctttcacacgatctgtgacgtccttagatacgcctgcaatcagagaaaccttaccttcggctaccgttgccagcacgataattgtcgaccccagctgattttttaaatcgtcaaccatggtacgcaacattttcggctcaacaccgctaagctcgctaaccaacagcttaacaccattaacatcaattgccttactggaaagatttgcgctctcctgtgcggcagcttgttctttaagctgttgtagttctttttctaactgacgcgtacgttccagtactgagcgcactttatccgccagattattgctatcgcctttcagcagatgcgcgacttcgcttaagcgatcgctgtctgcatgaacggtggtgatagcgccttctccggttaccgcttcgatacgacgaacgcctgcagcagtacccgattcagagatgatgcggaacagaccaatatcaccagtgcggctggcgtgagtaccgccacacagctcggtggagaaatcgcccatgctcagcacgcgtacacgctcatcatacttctcgccgaacagcgccatcgcacctttcgctttcgccgcttcgagatccatgatgttggtttcgatcggcaaattgcgacgaatctgtgcgttcaccaggtcttcgaccgcacgaatctcttccggtttcatcgcttcgttgtgtgagaagtcgaagcgcagcaccttgtcgttaaccagtgaacctttctgcgatacatgagtccccagaacctggcgcagcgcagcgtgcatcaggtgcgttgcggagtgattcagacgaatacgggcgcgacgagcctcatcaacatcagcctgcacagcgtcgcccactttcagagaacccgcagcaagtttaccgatgtgaccaatcgcctggccgtatttctgcgtatcttccaccgcgaaggagaagttagcgcctttcagttcgcctttatcaccaacctgaccgccggattccgcatagaatggcgtttgatccagcacgaccacagcttcctggcctgcattgatggcatcaaccgctttaccatcaacaaacagcgcggtcactttgccgttcagttccagatggtcatagcctttaaattcagatgcactatcaacacggatcattgcgttgtaatcggcaccaaagccgctggcttcgcgcgcgcgacgacgctgctcttccattgctgcttcaaaaccagcttcgtcaactttgatgttgcgctcacgacaaacatcagccgtcaggtcaaccgggaagccataggtgtcgtacagacggaaagccgtttcaccatccagcgtatcaccagaaagttttgccagctcttcatccagcaacgccagaccgcgctccagagtacgggcaaactgctcttcttcagtcttcagcacctgctcaacctgcgcctgctggcgtttcaggtcttcacccgcagagcccataacgtcgatcagcggaccaaccagtttgtagaagaaggtttctttcgcgccgagcatattgccgtgacgcactgcgcgacgaatgatacgacgcagtacataaccacggttttcattggacggcattacgccatccgcgatcaggaacgcacaagaacgaatgtggtcagcgattacgcgcagcgatttattgctcagatcggtcgcgccagtgactttcgctaccgcctggatcaacgtgcggaacaggtcgatgtcatagttagagttaacgtgttgcagcaccgcagcaatacgctccagacccataccggtatctacagacggcttcggcagcggttccatcgtgccatctgcctggcggttgaactgcatgaagacgatgttccagatctcaatgtagcggtcgccgtcttcttccggacttcccggagggccaccccaaatgtggtcgccgtgatcgtagaagatttcggtgcacgggccgcacggaccagtgtcacccatctgccagaagttgtcagatgcgtatggcgcacctttgttatcgccgatgcgaataatacgttcgcgcgggatccctacttctttttcccagatttcgtaggcttcgtcgtcgctttcatagacggtaacccacagacgctctttcggcagggcaaaccatttttcgctggtcagcagttcccatgcaaactgaatggcatcgtgtttgaaatagtcgccgaagctgaagttgcccagcatttcgaagaaggtatggtgacgcgcggtgtaaccgacgttttccaggtcgttgtgtttaccacccgcacgcacgcagcgttgggaagtggtagcgcgggaataattacgcttgtcgagcccaaggaacacatccttgaactggttcatcccggcgttggtaaacaacaaagttgggtcgttatggggtaccagggagctgctggcaactacctgatgtcccttactatggaaaaagtcgagaaacgcctgacggatctcagcggtgctcttgctcataattatcctgaaatcaagctaacgaaatatcgccaccagctccagcgtgtcttaaccgccgggctggtaactgaaaagtgggaataagataagttttcttgagtgggaagtaaaataccgtatgcgttcagtcggcaaaatttcgccaaatatcctggatatcttccatcagatagccacgatagagcagaaaacgctggatcttaactttttctgaaaagacagttggcaaaggttcaccatattttcgcgtcgcctgatcgcgcaccagtgcgcaccagtcgatgtcacattcacgcatcgctttttctgtcgcttcgcgggaaatacctttctgattcagttcctgacgaatacgtgcaggtccataacctttgcggctacggctggcgataaagcgcgcaacaaatcggctgtcatcgagatagccatgttcatggcaccaggcaataacgcgctcgtaatcttctgccgtagcatcaatctcttctgggccatttttgcccataatcggtgccgcgagtttacgtcgcagttcttgctcactgtgatcgcgcaccgccagaatgcgtaccgcacgatccaacaggcgagcatatgccgggcgacgggatgttgattctgtcatggcatatccttacaacttaaaaaagcaaaagggccgcagatgcgacccaggttttgctgataaacagatttaatagtcaatgagtgtgcagccaattcgttagaggatcgaggtgagagtaatttttcacgccagtgttggcctgttcccctcaccctaaccctctccccaaaggggcgaggggaccgtccgtgcacacattatctattatcatcaataacgaacgattaaaaatcttcgttagtttctgctacgccttcgctgtcatctacagagaaatccggcgttgagttcgggttgctcagcagcaactcacgtactttcttctcgatctctttcgcggtttccgggttatctttcagccaggcagttgcattcgctttaccctgaccgatcttctcacctttgtagctgtaccacgcgcctgctttctcgatcagcttctcttttacgcccaggtcaaccagttcgccgtagaagttgataccttcgccgtagaggatctgaaattcagcctgtttaaacggtgcagcgattttgttcttcaccactttcacgcgggtttcgctacccaccacgttttcgccctctttcaccgcgccgatacgacggatgtcgagacgaacagaggcgtagaatttcagcgcgttaccaccggtagtggtttccgggttaccgaacatcacaccaattttcatacggatctggttgatgaagatcagcagcgtgttggactgcttcaggttacccgccagcttacgcatcgcctggctcatcatacgtgccgcaaggcccatgtgagagtcgccgatttcgccttcgatttccgctttcggcgtcagtgccgccacggagtcaacgacgataacgtctactgcgccagaacgcgccagggcgtcacagatttccagtgcctgctcgccggtgtccggctgggagcacagcaggttatcgatatcgacgcccagtttacgtgcgtagattgggtccagcgcgtgttcagcatcgataaacgcacaggttttaccttcacgctgcgctgcggcgatcacctgcagcgtcagcgtggttttaccggaagattccggtccgtagatttcgacgatacggcccatcggcagaccacctgccccaagcgcgatatccagtgaaagcgaaccggtagagatggtttccacatccatggaacggtcttcacccaggcgcatgatggagcctttaccaaattgtttctcaatctggcccagtgctgccgccaacgctttctgtttgttttcgtcgatagccatttttactcctgtcatgccgggtaataccggatagtcaatatgttctgttgaagcaattatactgtatactcatacagtatcaagtgttttgtagaaattgttgccacaaggtctgcaatgcatacgcagtagcctgacgacgcaccgcatcacggtcgccgctgaagcattcccgccgggtaatgccttcaccgcgggcagtggcaaaagcaaaccagacggtgccgacaggcttctcttcactgccgccatccggcccggcgataccactaatagacacggcataatcagcacgagccgctttcagtgcacctatcgccatttccaccacgacgggttcactcaccgcgccatgctgcgccagcgtctcttcgcgtacgccgatcatctgcgctttggcttcgttactgtaggtgacaaatccgcgttcaaaccaggcggagctaccggcaatatcggtaatcactttcgctacccaaccaccggtacaagactcggcagttgttacggttgcgccacgggctttcagcgcctgcccaacctgttcgcttaactgcatcagttcactgtcagtcatcacaacctcagtcagtcaaaaatttatgccggacaagatagcactttcgtcaggaagatggtgttggcgttgcaattttacgaggaggattcagaaaaaagctgattagccagagggaagctcacgcccccctcttgcaaatagttactgcacgcgcgccagcgccacggcttgtcctaactgccagaccgccattgcgtaatgggtgctgtggttataacgggtaatggtgtagaagttcggcagaccgtaccagtactggtaaccggtaccgacatccagacgcagcaggctggcttgttgatggttgcccagcggctgctgtggcgttaaacctgccgtggcaagctgcgaaatgctgtacctggttttgaagccatttggcaagcctggagcctgaccgtttgccattaccgcgacctgatcgcctttcacccagccgtgcgctttgaaatagttcgccacactaccgatcgcatcaaccggatcccacaggttgatatgcccgtcgccgctgaaatctaccgcatattgtttgtaagacgacggcataaactgtccgtagcccatcgccccggcaaaggaacctttcagattgagcggatcgtcctgctcgtcgcgcgccatcaacaggaaggtttccagctcgccagagaaatactccgcgcggcgtgggtagttaaatgacagcgttgccagcgcatcgaggatgcgagttttccccatcacgcgcccccagcgggtttcaacgccgataatcccgacgataatttccggcggtacgccatacacctgccacgcgcgattcaacgcatcttcatactgattccagaaaaccacaccgttctgcacgttgtccggcgtaataaattttttgcgataacgcagccatgcgccgttcggacctgatggcggtttcaccgatgtggttggtgcctggttatccatcagccgcagtaccgaatccagacgcttcgcctgggagagaatttcctgcaactgctgacgatcgaaaccgtgtttgttcaccattctgtcgatgaactgctgggcattcgggttattagcgaaatcgccgcccatctgcatcacattgtgctgaggctcaagcaggaagccgccagacggcgttccggtggtcgtttcagtctcagtaggttttggcttgctgctacaggcggcaagcaacacaaaaaggggaagcaatgttacataacgacgcttgaacatgaggggtccatttaacagattcaaccaggggcaagtatggtaaagcatcacgccccgcacaaggaagcggtagtcactgcccgatacggactttacataactcaactcattcccctcgctatccttttattcaaactttcaaattaaaatatttatctttcattttgcgatcaaaataacacttttaaatctttcaatctgattagattaggttgccgtttggtaataaaacaataaatcctgaaggagagaacaatgatagaaaccattactcatggtgcagagtggtttatcgggctgttccaaaagggcggagaggtgtttaccgggatggtgaccggcattcttccgctgttgattagcctgctggttatcatgaacgcactgattaattttatcggtcagcatcgtattgaacgttttgctcaacgttgcgccggtaaccctgtttcccgttacctgctgctaccgtgcattggcacgtttgtcttttgcaatccgatgaccttaagcctgggtcgctttatgccggaaaagtacaaacccagctactacgcggcagcctcttatagctgccactcaatgaatggcctctttccccatatcaaccctggcgaactgtttgtttatcttggcattgccagcggtctgacaacgctgaacctgccacttggcccactggcggtgagctatctgctggttggtctggtcaccaacttctttcgcggctgggtgaccgatctgaccaccgccatttttgagaaaaagatgggcattcaacttgaacaaaaagttcacctggcaggagcaacatcatgacgcgtattcggatcgaaaaaggaacgggtggctggggcggcccgcttgagctggaagccacgccgggcaaaaaaatcgtctatatcaccgccggtacccggcctgcgattgttgacaaactggcacaacttactggctggcaggctattgacggatttaaagaaggtgaacccgcggaggcggaaattggtgtcgcggtaatcgactgtggcggcacattacgctgcggcatctatccgaaacgacgtattcccaccattaatatccactcgacgggcaagtccagtccgctggcgcagtacattgtggaagatatttatgtctctggcgtaaaagaagaaaacatcactgtagtgggtgatgcgacaccacaaccctcttccgtgggccgtgactatgacaccagcaagaaaatcaccgaacaaagcgatggtttactggcgaaggtgggaatgggtatgggttctgccgttgccgtgttgtttcaatctggtcgtgacaccatcgacactgtattaaaaaccattctgccgtttatggcgttcgtctcggcgctcattggcatcattatggcttctggccttggtgactggattgcccacggtcttgctccgctggcgagccatccactgggtctggtcatgctggcgctcatctgctccttcccgctgctttcacctttcctcggcccaggcgcagttatcgcacaggttatcggcgtattgattggcgtgcagattggtctcggcaatattccgccgcatctggctttaccggcactgtttgccatcaacgcgcaggcggcctgcgacttcatcccggtcggtttgtcgctggcggaagcccgtcaggacacggttcgcgtcggtgtcccttctgtactggtgagccactttttaaccggcgcaccgactgtactgatcgcctggtttgtctccggttttatctatcaatagaggctgaaacatgaccgttatttatcagaccaccatcacccgtatcggcgcgagtgccactgacgccctcagcgaccagatgctcatcacctttcgtgaaggcgcgccagcggacctcgaagagtattgcttcattcattgccacggcgagttgaaaggtgcactccatcccggtttgcaatttacgctcgggcagcatcgctatccggtgaccgctgttggcagcgtggcggaagacaaccttcgcgaactgggtcatgtcaccctgcgcttcgatggtttaaacgaagcggaatttccgggcactgtccatgtggcaggccctgtacccgacgatatcgcgccgggatcggttttgaagtttgaatctgttaaggagtaaaaaatgaatcaggttgccgttgtcatcggtggtgggcaaaccttaggcgcgttcctgtgccacggtctggctgccgaggggtatcgcgtcgcggttgtcgatattcagagcgacaaagccgcaaatgtggcacaagaaattaacgccgaatatggtgaaggaacagcgtatagttttggtgctgacgccaccagcgagcaaagcgtcctggcgctctctcgtggggtagatgaaatctttggtcgcgtggatttgctggtctacagcgccggaatagcaaaagcagcctttatcagcgacttccagctcggcgattttgaccgtgaatctggtgggttatttcctgtgtgcccgtgaattttctcgtttgatgatccgcgacgggattcagggtcgcattattcagatcaactcgaaatccggcaaagtgggcagcaaacacaactctggctacagcgcagcgaaatttggtggcgtcgggctgactcaatcactggcgctggatctggcggagtacggcattacggtgcattcactgatgctcggtaacctgctgaaatcgcctatgttccagtcactgttaccccaatacgcgaccaagctgggtatcaaaccggatcaagtcgagcagtattacatcgacaaagtaccgctcaaacgcggctgcgattatcaggatgtgctgaatatgctgctgctctatgccagtcctaaggcgtcgtactgcaccggacagtcgatcaatgtcaccggcggtcaggtgatgttctaatcaacagcggagatccgttaaggatctccgtgagactaatagaatgcctgatgcgctacgctcatcaggcatacaggacttccgccactacattaaggaaaagttatggtatccgcactcatcaccgtcgccgttatcgcctggtgtgcgcaactggccttaggcggctggcaaatttctcgttttaaccgtgccttcgacacactatgccagcaagggcgggttggcgtgggccgttccagcgggcgctttaaaccacgggtcgtggtcgccatcgccctggacgatcagcagcgcatcgtcgacaccttgtttatgaaaggactgaccgtcttcgcacgaccgcaaaaaattcccgcaattaccggtatgcatgcgggtgatttacagcccgatgtgatctttccccatgatccactatcacagaatgctctatcattggcgcttaaactgaaacgtggataatttcgttgtgaatgttacttgcttgcgaagttatcattttgaaacctaaatcaggtaatcacgcccatgaaacctcgtcagcgtcaggccgccattctggagtatctgcaaaagcagggtaaatgctcggttgaagaattggcgcaatactttgacaccacaggcacaaccattcgcaaagatctggtcattctggaacatgcaggaaccgtcattcgtacttatggcggagtggtgttgaataaagaggaatccgatccgcctatcgatcataaaacactcatcaacacccacaagaaagagctgatagcagaagctgccgttagttttattcatgatggcgattcgatcattcttgatgctggcagtaccgttttgcagatggttcccctgctctcgcgctttaataacatcacggtgatgaccaacagtctgcatatcgtcaatgcgctatctgaactggataacgaacaaactatcctgatgccaggcggaacgtttcgtaaaaaatcggcctcatttcacggacagctggcagagaatgccttcgaacatttcagtttcgataaattgtttatgggcaccgacggcatcgatctcaatgcgggcgtaaccacctttaacgaggtttataccgtcagtaaggcaatgtgcaatgccgcgcgcgaagtgattttgatggcggactcatcaaagtttggccgtaaaagccccaacgtagtttgcagtcttgaaagcgtcgataagctgattaccgacgcaggtatcgatccggcgtttcgtcaggcgctggaagagaaagggatcgatgtgatcataaccggagagagcaatgagtgaagcactactgaacgcgggacgtcagacgttaatgctggagttgcaggaagcaagccgtttaccggaacgtctgggcgatgattttgttcgcgccgccaatatcatcctgcactgcgaaggcaaagtggtggtttcgggaattggcaaatcgggccacattggtaagaaaatcgccgcaacacttgccagtaccggcacatcggctttttttgtccatccggcagaagcactgcacggcgatctggggatgattgaaagccgcgatgtgatgctgtttatctcttactccggtggcgcgaaggaactggatctgattattccgcgtctggaagataaatctatcgcgctgctggcgatgaccggcaaaccgacgtcaccgctgggcctggcggcaaaagcggtgctggatatctccgtagaacgcgaagcctgcccgatgcaccttgcgccgacctccagcaccgtcaataccctgatgatgggtgacgcgctggcgatggcggtcatgcaggcgcgcggatttaatgaagaagattttgcccgctcccacccagccggggcactgggcgctcgcttgctgaataaagtgcatcatctgatgcgccgtgacgatgccatcccacaggtggcgttaaccgccagcgtgatggatgcgatgctggaactcagccgcaccggtctggggctggtggcggtatgtgacgctcaacaacaggtacaaggcgtctttaccgacggcgatttacgtcgctggctggtaggcggcggcgcactcaccacgccagttaatgaagcgatgacgacaggcggcaccacgttacaggcgcaaagtcgcgccatcgacgccaaagagatcctgatgaagcgcaaaatcactgccgcaccggtggtggatgaaaacggcaaactcaccggcgcaattaacctgcaggatttctatcaggccgggattatttaatccttcattcccagacgtttcgccagccgatgcaggttggcgacgtcggtttccagcatccgcgcgcaggcagcccagttatgatgattttgtgccagtgcctggcgaatagtttcacgctggaacgcttctgtcgcttcacgcaggttttgcttaacaacgggcaccgccgccgcttctggcggcggcaacgtcacctcaggaaaagcaaaatgttgcgcctcaagaatcacttcatcgccgttgcgggtggctctcgccagcactaccgcccgatgaatagcatgttccagttcgcgcacgttccccggaaaacgatagtgttgcagtaaatttcgcgctccggcacttaataccacgcgggagagccccagccgcaaacgacactgctcgcagaaataccccgccagcagaatgacatcatcgccccgctcacgcagcggcggcaccgaaagtggaaacacgctcaggcgatgaaacaagtcagcgcgaaatcgccctgccatcacctcttcgcgtaagtcgcggttagtcgccgccagcacgcgcacatcgacccgcaaactacggtcatcgccaacgcgctgaatatcgccatactgcaacaccctcagcagcttggcctgcaatgccaacgacaactcgccgatctcatccagaaacagagtgccgttatccgccatttcaaacttcccgctgcggttactgatagcgccagtaaacgctcctttcacatgcccgaacaactcactttccgccacactttccggcagtgcagcacagttgagatagaccagcggattcaccgcccgtggcgaggcttcatgaatcgctttcgccaccagctccttaccggttcccgtctcaccgctgatcaggacgttgagatcggacgccgccacaatctcaatctcttttttcagttgcgtcatgccaggggacaagccaatcatctgcgtctgtttcaccgcttcaaacggcgtggcatcgcctggcatcatattctggctttccagttgttcaatcagcaacgcattgcttaacgctcccgccgccagcgcagcaatcagccgtagctcttcgtcgctgaaaacatcgaactgatcgggctgcatcccgtcgagcgtcagtgcgccgatcaggttttgcccggcaaacaatggcagaccaacgcaggcgtgaaccttcagactctcctgcccaggaatcaaaccgtcatagggatcgggcaattcgctgtctgcgggaaagcgcaccacatccccggcgcgggcaatcgcttccagccgtggatgcccttccagcgcaaagcgtctaccgagtacatcctttgccagaccgtcgatggcaagcggaataaactgccgcgaatcgtaacgtagcaacgcagacgcatcgcactccagcacctgacgtagcgtggtgatcaggcgctgaaaacgatcctgatgaccaatcccacgctgcaattcgatggcgatattcgccagcacatcaacggaaaaactcatctttgcctcactgtcaatttgactatagatattgtcatatcgaccatttgattgatagtcattttgactactcattaatgagcataattttatttatagagtaaaaacaatcagataaaaaactggcacgtaatctgcaattagcaagacatctttttagaacacgctgaataaattgaggttgctatgtctattgtggtgaaaaataacattcattgggttggtcaacgtgactgggaagtgcgtgattttcacggtacggaatataaaacgctacgcggcagcagttacaacagctacctcatccgcgaagaaaaaaacgtgctgatcgacaccgtcgaccataaattcagccgcgaatttgtgcagaacctgcgtaatgaaatcgatctggcggatatcgattacatcgtgattaaccatgcagaagaggaccacgctggggcgctgaccgaactgatggcgcaaattcccgatacgccgatttactgtactgccaacgctatcgactcgataaatggtcatcatcatcatccggagtggaattttaatgtggtgaaaactggtgacacgctggatatcggcaacggcaaacagctcatttttgtcgaaacgccaatgctgcactggccggacagcatgatgacttacctgacaggcgacgcggtgctgttcagtaacgatgctttcggtcagcactactgcgacgagcatctgttcaacgatgaagtggatcagacggagcttttcgagcagtgccagcgttactacgccaatatcctgacgccgttcagccgcctggtaacaccgaaaattaccgagatcctgggctttaacttaccagtcgatatgatagcgacctctcacggcgtggtatggcgcgataacccgacgcaaattgtcgagctgtacctgaaatgggcggctgattatcaggaagacagaatcaccattttctacgacaccatgtcgaataacacccgcatgatggctgacgctatcgcccaggggattgcggaaaccgacccacgcgtggcggtgaaaattttcaacgtcgcccgaagcgataaaaacgaaatcctgaccaatgtcttccgctcaaaaggcgtgctggtcggcacttcgacgatgaataacgtgatgatgccgaaaatcgccggtctggtggaggagatgaccggattacgcttccgtaacaaacgcgccagtgctttcggctctcacggctggagcggcggtgcggtggatcgtctttccacgcgcctgcaggatgcgggtttcgaaatgtcgcttagcctgaaagccaaatggcgaccagaccaggacgctctggagttatgccgtgaacacggtcgcgaaatcgcccgtcagtgggcgctcgcgccgctgccgcagagcacggtgaatacggtggttaaagaagaaacctctgccaccacgaagtccgacctcggcccacggatgcagtgcagcgtctgccagtggatttacgatccggcaaaaggcgagccaatgcaggacgttgcgccaggaacgccgtggagtgaagttccggataacttcctctgcccggaatgctctctcggcaaagacgtctttgacgaactggcatcggaggcaaaatgagcaacggcattgtgatcattggttcgggcttcgccgcccgccaactggtgaaaaatattcgcaaacaggacgccagtattccattaaccctgatcgccgccgacagcatggatgagtacaacaaaccggacctcagccatgttatcagccaggggcaacgtgccgacgaccttacccgccagacggcgggtgaatttgccgggcagtttaatctgcacctgtttccgcacacctgggtgacggatatcgatgccgaagcccatgtggtgaaaagccagaataatcagtggcaatacgacaagctggtgctggcaactggtgccagtgcctttgtcccgccagtgcctgggcgtgagttaatgctgacgttaaatagtcagcaagagtatcgcgcctgtgaaacgcaactgcgggatgcccgacgcgtgttgattgtcggcggtggtttgattggtagcgaactggcgatggatttttgtcgtgcaggcaaagcggtcacgctaatcgacaacgctgccagtattctggcgtcattaatgccaccagaagtaagcagccgcttgcagcatcggttgacggagatgggcgttcatctgctgttgaaatctcagttgcaggggctggaaaaaacggattctggcattctggcaacgctggaccaccagcgtagtatcgaagtggatgcggtaattgccgccaccggactgcgcccggaaacagccctggcacgacgcgccgggctgacgattaatcgcggcgtttgcgtcgatagttatctgcaaaccagtaatgacgatatttatgcgctgggcgattgcgcggaaatcaacggtcaggtactgccattcctgcagccgattcaacttagcgcgatggtgctggcaaaaaatcttctcggcaataacacgccgctgaaactaccggcgatgctggtgaaaatcaaaacgccggaattaccgctgcatctggcaggcgaaacccagcgtcaggatttacgctggcaaattaataccgaacgccagggaatggtggctcgcggtgttgacgatgctgaccagcttcgcgcctttgtggtcagtgaggatcggatgaaagaggcatttggattgttgaaaacattgccgatgtaggtgggctactgtgcctaaaatgtcggatgcgacgctggcgcgtcttatccgacctacggggacgcatgtgtaggccggataaggcgtttacgccgcatccggcaatggtgtccaaatgcaacacgttttatccgttctggacttcacccgctaaccaacgcgccgcagcaataaccccctgccccagagacaaaccgccatcacccgccggtaaactctgtggaaagagcaatgtgaaatcagcgagataatgcgccagacgtgcacgcagcaaacggttatgaataaccccgccgctaaataccagcgtagtgataccacgcatcgtggcctgctcacgcatcaacgcggcaaaaccctgcgccagcgcatcatgaaacgcccacgcgcgttgattaaccggtgcctgccagttcagccactgctgccagaaagcggcgagatccagttgattgtccaccagcggcatcgtcaccggatgcgtcactccgtggcatgaggctgcgagcgcctccagagcacaagccgcttcaccttcataacttaacgtggctggcgcacagcccagtgccgccgccactgcatcgaacaaccgcccacacgatgacgccagcggcgcgttaattccacgctcaatggcccgcgccagcacgctccagttttgctgttgcacacttgctgtttcagggtaattctgccactccggcacaaagcgcaggcactgcgccagcaggtttcgccacggctgcttcgctgccaaatcgccacccggaagcgccactgcaggcaagccgcccaggtgctcacattcgcgatagttcacccgcaggcactcgccgccccacaaagcgccgttctcccccataccgataccgtcgagcgtcaaagcaatgacatcaccgccatccaacggccactgatgctctgccagacacgccgctgcatgggcatgatgatgcagtaccgtttgcgtcggcagattcatttcacgcgcccactggctggagacatagcccggatgcgcgtcatgcacaacgtattgcggggtaaaatcgtagatgttttgcatcaggcgtaacgcttcgcgccactgcatctggatgccatcgtcacttaaatcgcccagatgctgactcaacaccgcttgttcaccgcgcaccaggcagaaggtatttttcagatccgcgccgagacacagcacaggcggaacatttttaaagcccggaggcaaagccagcgcatccggcacatacccccgcgaacggcgcagcatttcgccgctttcgcgcaccaccgaatcatccatccgctgcacgatgtcgcggttatgtatcaagaatccgtcggcaatgccctgcaaatccgccagcgcctgttcgttgctgatagctggtggtttaccgctcaggttgccggaggtcatcaccagcgggcattgcagttcctgtaacagcaaatgctggagcgggttcgcaggcaacattaccccgacttcgttaaggtcaggggcgatatcatcacaaagctcaggaacgtattttttatccaccagcacaatcggcgcggcgggcgtggtaagcaactggcgcgcagcgtctggtaaaccgtcagccactggcaacatgaccgccagcggtttcgccgggcgatgtttgcgcgcccgaagtgtcgccaccgcgttactgttacgtgcatcgcaggcaagatgaaatccgccaatccctttgatggcgacaatgttgcccatttttaactgtgcgatagccgcctgtaatgccgcctcttgttctgcatgttcaccatgacttacccattcaagatgtgggccacactccgggcaggccaccggctgggcgtggaagcgacgatcgagcgggtcacggtactctttgtcacaagccggacacaacggaaacgccgccatcacggtaaacgggcggtcgtaaggcatggcgcgaataatgatgaaacgcgggccgcagtgggtacagttgataaacggataacgataacgccgttcgcctggggtattcatttcggcaaggcaagcagggcaagtagcggcatccgggacaatttgcgtattcatggcacctcccgcgctctggcggatggtgaactcagtgggcagttgtgaccagatgtacggctcacgctcgacgctatcaatacgcgccagcggcgggcagtgctgatgcaattgaacaagtaacgtttccgggtcttcccgcagccggacttctacgccatcgccgtcattacagacatcgccgtgaagatttaattgctgtgccagctgccagacaaacggacgaaaaccgacgccctgcactttgccacgaatacgcagttggacaccgcaagatgtgttttttgccattgagttattcccgccatcatgaattgcgtaacccgtcctgccggacacgactgcgtcgtatccggcagtctcaggtcggcgataccgccagctccgtattctacgaatatttccgggaattcctttgatgccagaacagttctgtaagatttttagaacatcagcgccgtacggcggcgtttttctgcactcagttgttcaagtttattacgatcgacacaaatcagcgcatgagtcgggcaagccgccatacacgccgggccgtcttcacgatggttgcacaggtcacatttattggcttcggctttgtcagcccgtacattcagccccgcgccgctgttgcgaatcaccggacgtaccaccacttccatcgcgccatacgggcaagccacaacgcaggttttgcaaccaatgcaacgttcctgcatcacatgaacaaaccctttatcacggctgatagcaccattcgggcagacgttagcgcacggtgcatcttcacactgacggcaaactgtcgccgtggaaatgttcacacctttaatgacatggatacgcggtaaaaatgtttccggggtcagcgatgcacagtcctgattttcctgatgagaaaccacgcacgccacttcacaggtacggcaaccaatacatttactcgcgtcagcaatgatgaaacggttcatcaaattctccagcaatgacagttaatgcgccgatacattcacaaatcatgccagttttaattcactgttatttaaggaaattaatttctgtaatgcaggaaaaaagatgtcatcgacactagtgacgatgacatgtgatgacaatgtttatcgcgaaagagcaatgagtgagtcgcggcggatcagttttccgctgaaggttttcggcggtgagaaatccccgccatcgagcataaaaatcagccgtccaataatttcctgaatcatctcagtcaccggaatttttacgctggagagcgccggaacgatatagggggcaattgcgatatcatcgaatccgataactgacacctgctctggcaccgctacgccgcgctcgtgcaacgctttcatcgcacctatcgccatatcgtcgttactggcaactaacgcgctaaatttagccccacgttcgagcaacgtttctaccccttcggccccgctggcgggcgtccatttaccgttagcgataagtttttcattgagcgcaataccatgctgcgccagcgcgtctttatacccagcaagacgttcaatgctggtgggggaatccatcgagccggtaaggaaagcaatctcctgatgtccggcgtttatcaactctgccacggcattaaagctggtctgtttatgatcgcaccagacgctatggctgctgtttttgcgcaggcggcgattaagcaccattatcggctgactgtgcgcgtcaatgatgtcatcgatctcatccacgcttaaaaaacgcgggtaaatcataatggcgtcgcagcgcaaatccagcagatactgaatcgcctggcgctcttcttcggcgctgtgtttaccatctgccaatagcaactgccgccctttctcttccgccattcgcgcggcatgaaagagtaattcactaaaataaatgccgtggtaaagcgtgttggtcactaccaaccccagcgtctgagtactcttcgccgacagattgcgcgccagcaagtttgggcggtaaccgctctcttctaccgcctgaaacacgcgatctttagtctcctggctgacgtagccattacctgaaagcacgcgggaaacggtcgcttttgaaaccccggcgcgcttcgccacttccagcatcgtcgtcatcattttcatccctttacacgcaatcaacgcagtgtactgcaccgtttgccgattgtccttgcgcaatcggcgggaaaaatattcaggtgaccggtttcacaaatataaaaaatgaacaattaactctcttgcttatttagtgacaactattcatgattttgtgaaaccggtttcctaattccgtttcagcatcggcatttttccgttacgtcgactgataacaactacatctaccctactgataacaggataaaatccgatggccaaaaattatgcggcgctggcacgctcggtgatagcggcactgggcggcgttgataacatctcggcggtcacgcactgtatgacgcgtttgcgcgttgttatcaaagatgaccagcttatcgacagcccgacgttaaaaaccatccccggcgtgctcggcgtggtacgtagtgacaaccagtgtcaggtgattatcggcaataccgtttcacaagcctttcaggaagtcgtcagcctgctgccgggagatatgcagcccgcacagcccgtgggtaaacccaaactcacgctgcgtcgcattggtgcggggatcctcgatgcgctgatcggcaccatgtcaccgctgatcccggcgattatcggcggatcgatggtcaaactgctggcgatgatcctcgagatgagcggcgtgctgacaaaaggatcgccgaccttaaccattctgaatgtgattggtgacggtgctttcttcttcctgccgctgatggtcgcggcatctgccgccatcaaatttaaaaccaatatgtcgctggcgattgccatcgcgggtgtgctggtacatccgagttttattgaactgatggcgaaagcggcccagggtgaacatgtcgaatttgccctgattccggtcaccgcggtgaaatacacctacacagtgatcccggcgctggtgatgacctggtgcctgtcatatatcgaacgctgggtggatcgcattacaccggcggtgaccaaaaacttcctcaagccaatgctgattgtgttgattgccgcaccgctggcaatcctgctgattggcccgattggtatctggatcggtagcgccatttcggcgctggtttacaccattcatggttatctgggctggctttcagtcgccattatgggcgcgctgtggcctctgctggtaatgaccgggatgcaccgcgtctttacgccaaccatcattcagaccattgccgaaaccggcaaagaagggatggtcatgccgtcagagatcggcgctaacctgtcgctgggcggttcatcactggcggtggcgtggaaaacgaaaaacccggaactgcgccagacggcgctggctgcggcggcatcagccattatggcggggatttccgaaccggcgttatacggcgtggcgatccgcctgaaacgtccgcttatcgccagtcttatcagcggttttatttgcggcgcggttgccggtatggcggggcttgccagccactcaatggcagcgccagggttatttaccagcgtgcaattcttcgatccggcgaatccaatgagcatcgtctgggtgttcgcggtcatggcgctggcggtggtgctgtcgtttatcctcacactgttgctcggctttgaggatattcctgttgaggaagcggctgccgaggcgcgaaagcatcagagcgtacaaccgaccgtcgccaaagaagtaagtcttaattgaggatgaaaatgtcagtatttccagaaggttttttatggggcggcgcgcttgccgccaaccagtctgaaggtgcgttccgtgaaggtggcaaagggctgaccactgtcgatatgatcccacacggcgagcatcgaatggcggtgaaactggggctggaaaaacgttttcagttgcgcgatgacgagttttatcccagccatgaggcgacggatttttatcatcgttataaagaagatatcgccctgatggcagagatgggattcaaggttttccgtacctcaattgcctggagccgtctctttccgcagggcgatgaaatcacgcccaatcagcagggcattgctttttatcgttctgtctttgaagagtgtaaaaagtacggtatcgaaccgctggtcacgttgtgccacttcgatgtgccgatgcatctggtcaccgaatatggctcctggcgtaaccgcaagctggtggagtttttcagccgctacgcccggacctgctttgaagcatttgatggtctggtgaaatactggcttaccttcaatgaaatcaacattatgttgcatagcccgttctccggcgcgggtctggtgtttgaagaaggtgaaaatcaggatcaggtgaaatatcaggccgcgcatcaccagctggttgccagtgcgctagccaccaaaatcgcccatgaggttaacccgcaaaatcaggtgggctgtatgctggcgggcggtaacttctacccttacagttgcaagccggaagatgtctgggcggcgctggagaaagaccgggaaaacctgttttttatcgatgtgcaggcgcggggcacgtatccggcttactctgcccgcgtattccgcgaaaaaggggtaaccatcgacaaagcaccgggcgatgatgaaatcctgaaaaacaccgtcgattttgtctctttcagctattacgcctcgcgctgcgcctcggcggagatgaacgccaacaatagcagtgcggcgaacgtagtgaaatcgctgcgtaacccgtatctgcaagtgagcgactggggctggggtattgatccactcggtctgcgtatcaccatgaacatgatgtacgaccgttatcagaagccgctgtttctggtggaaaacggcctcggcgcaaaagatgaacttgctgccaatggcgagattaacgatgactatcgcatcagctatttacgcgaacatatccgcgcaatgggcgaagcgattgcagatggcattccgctgatgggctacaccacctggggctgtattgatttagtctccgcctctacgggtgaaatgagcaaacgctacggttttgtctacgtagaccgtgacgacgcaggcaacggcacgctgacgcgcacacgtaagaaatcgttctggtggtataaaaaagtgattgccagtaatggggaagatttagagtaggtaacagtgccggatgcggcgtgaacgccttatccggcctacatgtcgcacgaaccaggaaggcccgataagcgcagcgcatcgggcaatctggggtttggcatcagtcaaaatcaaagaaaccattccggcttaacgccaaatcgggctgaaagtgccttaatgtgggatatcgtcagggatcgttgtccagacaaaatctgactgaccagggatttagagccgatttcgttcttcaaatccgcataggtcagattatgttgatcaatcagcgtgcgaagtaacgccacgccaacaggcattgccgcaacggctttgtcgaactctgcaaactcttggttgttgttttcatattctgcaatgcggctcgccagaaagtcgataagtggattggtgtcatcttcttcaatcaaatattcgaccagttccagtgcttcacgataatcatcttctgagtcactacctcccagaaaggggactgcattgaccagttctcttgttgctttaacagcgcgtgcagcattagcagtcattctttgttctctctgtagtaacgtgtcagtttgtcatactcggcgtgattagttatgtgcttcacaaagaaccgcttattaacaaagtttatgtaggcaatcacccttaggttgttcccacctacatccagaacgtaccatttgttgcgatatttaaaattgtcgaggttgggaaacgccgttcgcatctcttctggcgtagaaaaatccgtttccttaataacccgatacaatgcctgaagagccagagcgtcgttaggatatttacgcgcagactcttcaaatggcgctttagaaatgatgtgcatttttaagttttaacttccttatagtaagtaaacagccacatctgcgagttctatccttatgtgttcggaaactatagctcatcaaatccaagttcacaatatgtaaacacttgagcgcgatataattacccccaaaatcctcatagccactctgcaaaaagtcagttctggttcaccccatcaagaacatccccctttatcaagcaacgctgcgtctgcgccagatcttccgtttgcgggtcgcgcccggcgatgggtttgaggacgagtttacggttgggggtataagtaaaacgcgtgagcgcgggatagcttaacttgccaaaccagccgtgaacacgctgccatttggcgtcttttacctgatacagactggttatccagtaaccggaatcaaactgcatatccagcaattgcgtgtgaccattgccttgcaaatccagcaaatcatctacgccagttttgcttgcggtgtagaatcccctgggttcaaagacacagggacggccttcgcgcgtgaacgtcataagaattaaatgtgcataaggagccagaccattaccggtacttggtaaccagataaccagatcctgaatgccgttacgatcaagatcggcgcgatagagttgccctttgcccgctatgtttgccagcatacccacaggcacagaccaggatttaccggcgcgatctttaccgttcaattgccattcactatcatcatttggcatcttttcaagcgtcacgccagcaacgcccacttttctaaaatgccaggtttgctcggcatcataaggcatggtcaggagaggtttcagcgcccgcttttgcgcgtattcgctgtcactcattggcagatattcggtaaagctggtggcctgtgcaggcagcactaagctcaataaaaaagcgcacatccctgttctgatattcatttcgctgaattccctgatggagaattattcttcttccaccgctaactgcgcgaagccgccattcccttcccagccttccagtcgttgataaacggtttctaccgcatctttaatcggctgagtcatcgggtagtaaaagccgacgatatccggctggatgccgaggaaaatcacttcgccaatgtcttctttcaactggtcgataagatagttcagcggcatgttatgggtagtcatcataaacatctcggcgatatcatccgggtcgatgatgcggatttcgccggggtttagccccatatcagtagcgtcaacaatcagtaaccgcgtagggcgcagttcacggatggcgacgatgtcgttttccggtgcactaccgccatcaatcaccacccagttacctttcggcgcggcggcgcacttttccgccagcagcgggccagcgccatcatcgcccatcatgctattgccaacacagagtaaaacgtcagtcacgcagtctcctcaccatcaaatagatggcgttttcctgatgaatatcatgcagcatacttaacagcattgtactccattccttctgctgcgaagtttgcgctgcccgggctttatcgaatgcgttggccagcatcggcacatggttaatgtcgatgacgatctcaccatatttcggcacgccttccattttgcggcgggcttcactgcccgcctccagagtggcaatccatgccagatattcatcccacgggcaggtgagcgccgcttccaggcaatcgataaccccaaggtggtgaccaatcgccaggctgtaatagaccacctgctgcgcctcggcgggcgtggcatcgttctcatcaataaatttacggctcagttgactgaacaccaccttttcactcatcggatacgcgcctcttcaacaacatgattcagatggctgacaatctcgttcagacgcggatcgttttccgcttccagccagcgtgcaacctgttcttcgccctgccctaactgtgtcaggaagtcatcggcaatctgacgaccgtaacgataacccgccaggcggcgtgcttcgcgatccactttcacacgcagcggctgcaccatatcgccatgcaggatttccgcctgttgttcatcctgctcacccgggccacgggcgtgaattttctgctccagcaggccgagcgccattgcaaagccgtacagcgtggcggcaggcgttggcgggcaaccaggaatgtagacatctaccgggacgattttatccgtaccgccccacacgcagtagagatcgtggaaaataccaccgctgttaccgcaggcaccgtaggagatacaaattttcgggtccggcgcggactgccacgcacgcagcgcaggggatcgcattgcacgggtgaccgcgccggtaaacagtaaaatatccgcatgacgcggtgaaggaacgactttaatgccgaagcgttctgcatcaaacagcggcgaaagcgtggcgaaaatttcgatttcgcagccgttgcagccgccgcagtccacgcgataaacgtaggcagaacgtttgatttttttcagtaacgacgccttcatgctggcgatggattcatccaccgtcatcgggaccggaatgccgttggcgtcacgggggcctaataaattgctcatcagatggcctctttcatatggcgagtcagttcaatacggtcggacggcaccaggcatttctggcgcttacattccgggcaagtctcaaagctttcgcggtggttttccgcgcggctgtcgccgttgtgcttaagcagcgcaatggcgtagtcgatctctttctggacggcgaaaggacgattgcagacgcggcagttgcacagcgcgaagcgggactgttgcaggaagtcttctttcttccacactgccagttcgtactcttgcgacagtttgatcgccgccgtcgggcaaacttcttcgcagcgtccacagaagatgcagcgcccgagattaaactcccacgccagctcaccggtggcgaggtcagtttcaaccgttaaggcgtttgacgggcaggcattgacgcaggccgcacagccgatgcactgctgcgggttctgctccggcttaccacggaagtttttatcaaccgcaatcggctccagcggataagacgaggtcgccgtgccggttttgatgacttttttgataaaggtaaacatggcgattccttatttcagcggcgagtttttacgctcaatgctgtaacgctcgagttctttgtacggcaccactttgctctttttcttacgcacatcgaccacggtcatgcggtcggtacaggagtagcaagggtccaagctaccgataatcagcggcgcatcggaaacggtgttaccgcgcagcatgtagcgcagggtcggccagttcgcgtaggtcgcggcacggcagcgccagcggtacagcttctggttgtcgccggtcatgctccagtggatatcgtcgccgcgcggcgcttcggcaaagcccagcgcgaaacggtgcggaatgtaggtaaagccttccaccatcagcggaccgcccggcaggttatccagaccgtagtcgatcatgttcagcgcggtataaacttcgttgatacgcactttcagacgggaaataacgtcgcagccctgctcgctgtggacttccattggcagcaggccataaccgacaaacgggtgatcggcgcgagtatcgcgggcgtgaccgctggcgcgaaccatcgggccaacgttactgaaatcgcgggccatttccgggtccagacgaccaatgccgacggtgcgctgttccatgttcggcgtactcagcagcacatccaccagctcctgcacttcacgacgcatctgttgcgccagctggcgggtctggatcatgtcatctttcaacagatcgcgacgaatcccgccgatcaggttcaggccgtaggttttacgcgcaccggtgaggatctctgccattttcatggaggtttcacgcacgcggaagaactgcataaagccggagtcaaagccggtaaagtggcaggcgagaccgaggttgagcagatgcgagtgcaggcgttccacctccagcagaatggcgcggatcatctgcgcacgttctggcacctgaatacccatcgcgttttctaccgacgtggtgtaggcggtgctgtgggcaaagccgcagatcccgcacacacggtcagagaggaaggtcacttcgttgtaacccatacgggtttccgccagtttttccatgccgcgatgaacgtagaacagacggtagtcggcgtcgataatgttttcgccatcgacgaacagacggaagtggcccggttcgtcagaagtgacgtgcagcggaccaatcggcacgacgttgtttttcttgtcgcccagttcgttgatgaactcgtaggtttcagcatcggtggtcggtgccggacgctgacgataatccatgctgtctttacgcagcggataaagttcatccggcagcaccagacggcgttcatccggcagaccaaccggaatcaaaccgtacatatcgcgcacttcgcgctcgccccacaccgccgccggaacgcgcggcgtcacggacggatactccggtttgttggcatcaacttcgacgcgaaccgttacccagcacttagtccccttctccatcgacagcacgtaataaacggcgtaatgaccattcagtttgcgttcgtcgttaccaaaaagcaccgacaaccagcccccctgcttgtagtagagaaactccaccacttccggcagatagttcacctttacggtgacagtcagctgatctttggtctgccaggcgtggtccagcacgacgcccggaaatgcctcattcagcgcggcgagataatgttgacctaatttttcttcagacatgctcaaactctctttaatcacgccgccagcaaggagacgaacgctaaaaatgcaaagccaaacccagtccaggtaatgcgcggagtaatatcaagacgcagacgggccatgctgttttcgaacagcgcgataaccaggacgccgacgaccagtttgacgatggcaatcaccagcgccagcagcagcccaccggcggtgaaggtttccatctgtccccacgggataaatacgccgacgaacatctgcagcaccaccagctgtttcaggctgataccccatttcatgacgccaaagccgctgccgctgtattcagagagcgggccttcctgcagctcctgctcggcttccgccaggtcgaacggcagtttgcccatttcgataaaggtggcgaacgcacaggcacaaagcgccagtaccagcgggatgctctggctcagcggccagtgataaacggtgtcggtgatgttgctgatgttggtggaaccggcaacctgtgcggcaacccacagaccaagcagcagcatcggttcgaccagcacgccaagcatcgcttcacggctcgcgccgatagcggtaaacgggctaccggtatccagaccagaaatggcaaagaagaaacgcgcgatggcaaagagatacagtaaggtgattaaatcacccagttgcggcagcggagaaccgacggtcaccaccggcagcgcagtagcgatagtcagcatgacgcccaccatcacatacggcgtcaggcggaacacccagccggaggcatccgggccaacgctctggcggcccagcagtttgaaaatgtcacgatactcctgcaacacacccggcccacgacggttatgcagacgggcgcgcgccacgcgggtaataccggagagcagcggcgcaacggcaaataacaccagcgcctgaattaacggatataaaacactcattctcaggctcctcgtgaaacaataatcaccaccagtaccgccagttcaaccagcgccatccggcggaacagcaacgcactaccttcgcactgccagcccggcaccagcgacaccggattcagccatttgcgcagtttcagcactggcgcaaacgcctgtttaaccggcatggcaaaaccgtgagcggtaatcaccattgatttttcatggtcgtagccgcacacccaggccgcaccgcgggaacgtgacggcaggcggtcgcctttgcaaatcgccataatgatgaatggcagcagcgggcaggcaatcagcagcaatgtgatcattggttgagaaacggtggtgttagcaggctccagaggcagaggtacagcagcagagagcatcggcagcagccacggcgcagcaacaccgccaattacgcagcaaatcgccagtgccactacgcttacgctcatcaggagcggcgcacaggtggcgttttcggcttctttggtacgcggcgcgccgaggaacgtgacgccatagactttcgccatacacatcaccgccagcgcaccggtaattgccagacccacagcgagcagcggccccagcagacgggcaacaaacgcgccgctattgctcagtttgaagaaggattgatagataacccattccccggcaaacccgttcagtggcggcagcgcagccattgccatcaacccgactaacatggcgatggagataaccggcattttcttgccaataccaccgagtttttcgatatcgcgatgaccggtacggaaccagacgctccccgccccgaggaacagtacgcttttgaacaggctatggttaagcagatggtacagaccaccgaccaggccaagagcaatcagcgccggttgttcgagcgcgatacccgttacgccagcgcccagccccagcaggataatgccgatattttccagggtgtggtaagccagcaggcgctggatgttgtgttccatcaacgcatacagaccaccgacgaacgcggtgatcatgccgagcaccagcagcgcgatcccccaccacagcggtgcattaccgcccagcagtgacagggttaacatgcccagcaggccaattttcatgactaccgtagaaaacaacgcggcagctggcgcagaggcgttagcatgtgcctgcggcacccagccgtgcagcggaataatcccggccagcaggccaaagccaatcacaccgagcagccagatatcggaaccgagcggcagctgttgcatacgcatatccagtaggcacagatccagcgtgccataacgctgccacagcagccagcaagcaatcaccagcagcagagtgccaagacgccccagcgcaaaccacagtttgccctctttgctgttgctggtgaggaacaccgcacacaaggccatgacttcggccattaccacgaacatgccgaggttgctggcgatgacggcgcagacggcggcagccatcaacatattgatctgcaagccgttgcacttcacctgcgcgtggcgatgccagtcaatgttgtagaggctgacaaacagaccgcacagaccgagcgtaatcagccaaatcgcgttaagcggagagatttgcacatcgtagcttaccagcgacagcgcaccgctcacgccaaccgcgccagtcagtacagtgaagcccgcggctgccgtatacagactaccaaccgcgccgccaattccagctatccagccacttaacgctttttgaaaagaaaagagaaatgccagaacagcggcggcgacaaaccatgccacgccgctattgatcagggaaattgcgctcatttagcctctccactttgagcctgctgaaacaaggtgagatcgccaaagtccgtgttaaaggtcagctcacgcttacgtttgctgacgcgggcgatatcggtgttatccaccagatgcagggctttagtcgggcacatccgcacgcaggccggaccttgttcatcaaaactgcaaaggtcacatttgacggcgatcgcgcgaatacccggcacccagtcaagcagcgtactgatacgcgccggagcaggcggtgccggtggcgctttcggggtattggcgtttgccggaatatccagcggacggctgccggaaaattcaattgcgccaaacgggcaggcgatgccgcacagtttgcagcttacgcacagactttcattcaactgcacggccccatcaatgcgggtgatggcgttaaccgggcaaaccaccgcacagggtgcatcttcacagtggtgacagagctgcggcgcagattctttttcattcagcatcactctcaggcgcggcattgattgcaggccgtgctggcgatgcgtctctgaacaggcggcctcacaagtgtggcagccgatacagagcgtggagtcaacaattacaaaacgattcaccaggcattcctcaggtgattgtcatttttgacgaaaacatgccgatgaaatgtcattttcgacactcatcgacacgcccatccccaaacaggcgtaacgcctgcaaaacgggcaaagcctcagctcatgctgccgggctttgtccctttaccagttggcttaaattcaccggcacattgttttcaatagcggtgtataagctgtcgtaaacgccagcgattttttcgagatagtgttccagaacctgttcgcgatcgcggatgttgaccttgccatcaatcatgccgtcaatgctcagttgcgcctgcgcaatccgctgtttgtcttcgccatcttttgtttcgacgtaatactcgatggtgtggctgttaaagccatccgccagggtgacgtaaatacgaaaatgttcaaaaaggacgaaacagagttctttgtccggcgcgcagctcatggcgtgatgcaggcgcgctttcgataacgtgatcccctgaaccagcgaattgcagtagatgtgccactggtcctgtaggcgacgatgccgctgtgcgatgtaatcggctttctcgcttatttcccaaatagtcattgtcaggttacccgtttaacagagatgccagctttaagcattttctatgccaacttttaatttattgttattaaatagatttttaagctaaagatgaatttcgtcgccgtgtcgacgtgtcatttcgacatcatcgacattattcaccgcagggataatcaacactggcacaattattgcttgtagctggcaatagttaatgggaggcgatatgcacgaaataaccctctgccaacgggcactggaattgatcgaacagcaggccgcaaaacacggcgcaaaacgcgtaactggggtctggctcaaaattggcgcattttcttgtgtcgaaaccagctctcttgccttttgttttgatctggtttgccgcggcagcgtggcggaaggttgtaaactgcacctcgaagaacaagaggccgaatgctggtgtgaaacatgccaacagtatgtgacgctactgacccagcgcgtccgccgctgtccacagtgtcatggtgacatgctacagattgtggcagacgacggtttacagattcggcggatagaaatagaccaggagtgagcgatgtgtacaacatgcggttgcggtgaaggcaacctgtatatcgagggtgatgaacataaccctcattccgcgtttcgtagcgcgccatttgccccggcggcacgcccgaagatgaaaatcaccggcattaaagcgcctgaatttacccccagccagactgaagaaggcgacctgcattacggtcatggcgaagcgggcactcacgcgccgggcatgagccagcgtcggatgctggaagtcgaaattgacgtgctggacaaaaataaccgtctggctgaacgcaaccgcgcgcgctttgctgcccgcaagcaactggtgctcaacctggtttccagccctggttccggtaaaaccaccctgctgacggaaaccctaatgcgcctgaaagacagcgttccgtgcgcggttattgaaggtgaccagcaaaccgtgaacgatgccgcacgcattcgcgctaccggcacaccagcgattcaggtgaacaccggtaaaggctgccatcttgacgcacagatgattgccgacgccgcaccgcgtctgccactggacgataacggtattctgtttatcgaaaacgttggcaacctcgtatgcccggccagcttcgatctcggtgaaaaacacaaagtggcggtgctttccgttaccgaaggtgaagacaaaccgctgaaatatccgcatatgtttgccgccgcctcgctgatgctgctcaacaaagttgacctgttgccgtatctcaactttgacgttgagaagtgcatcgcctgcgcccgcgaagtcaatccagaaattgaaatcatccttatttccgccaccagcggcgaagggatggaccagtggctgaactggctggagacacagcgatgtgcataggcgttcccggccagatccgcaccattgacggcaaccaggcaaaagtcgacgtctgcggcattcagcgcgatgtcgatttaacgttagtcggcagctgcgatgaaaacggtcagccgcgcgtgggccagtgggtactggtacacgttggctttgccatgagcgtaattaatgaagccgaagcacgcgacactctcgacgccttacaaaacatgtttgacgttgagccggatgtcggcgcgctgttgtatggcgaggaaaaataatgcgttttgttgatgaatatcgcgcgccggaacaggtgatgcagttaattgagcatctgcgcgaacgtgcttcacatctctcttacaccgccgaacgccctctgcggattatggaagtgtgcggtggtcatacccacgccatttttaaattcggcctcgaccagttactgcctgaaaacgttgagtttatccacggtccgggttgcccggtgtgcgtactgccgatgggtagaatcgacacctgcgtggagattgccagccatccggaagtcatcttctgtacctttggcgacgccatgcgcgtgccggggaaacagggatcgctgttgcaggcaaaagcacgcggtgccgatgtgcgcatcgtttactcgccgatggatgcgttgaaactggcgcaggagaatccaacccgtaaagtcgtattcttcggcttaggttttgaaaccaccatgccgaccaccgccatcaccctgcaacaggcgaaagcccgcgatgtgcagaatttttacttcttctgccagcatattacgcttatcccgacgctgcgcagtttgctggaacagccggataacggtatcgacgcgttcctcgcgccgggccacgttagtatggttatcggcactgatgcctataattttatcgccagcgattttcatcgtccgctggtggtcgctggtttcgaaccccttgatctactgcaaggcgtggtcatgctggtggagcagaaaatagcggcccacagcaaggtagagaatcagtatcgtcgggtggtaccggatgccggtaacctgctggcgcaacaggcaattgctgatgtgttctgtgtcaacggcgacagcgaatggcgcggcttaggcgtgattgaatcttctggcgtgcacctgacgccggattatcaacgattcgatgccgaagcacatttccgcccagcaccgcagcaggtctgcgatgacccgcgcgcgcgttgtggtgaggtattaacgggcaaatgtaagccgcatcaatgcccgctgtttggtaacacctgtaatcctcaaaccgcatttggtgcactgatggtctcctccgaaggagcgtgcgccgcgtggtatcagtatcgtcagcaggagaatgaagcgtgaataatatccaactcgcccacggcagcggcggccaggcgatgcagcaattaatcaacagcctgtttatggaagcctttgccaacccgtggctggcagagcaggaagaccaggcacgtcttgatctggcgcagctggtagcagaaggcgaccgtctggcgttctccaccgacagttacgtcattgacccgctgttctttcctggcggtaatatcggcaagctggcgatttgcggcacagccaatgacgttgcggtcagtggcgctattccgcgctatctctcctgtggctttatcctcgaagaaggattgccgatggagacactgaaagccgtagtgaccagcatggcagaaaccgcgcgcgcggcaggcattgccatcgttactggcgatactaaagtggtgcagcgcggcgcggcagataaactgtttatcaacaccgctggcatgggcgcaattccggcgaatattcactggggcgcacagacgctaaccgcaggcgatgtattactggttagcggcacgctcggggaccacggggcgactatccttaacctgcgtgagcagctggggctggatggcgaactggtcagcgactgcgcggtactgacgccgcttattcagacgctgcgtgacattcccggcgtgaaagcgctgcgtgatgccacccgtggtggtgtgaacgcggtagttcatgagttcgcggcagcctgcggttgtggtattgaaatttcagaagtggcactgccggttaaacctgccgtgcgcggcgtttgcgaactgctgggactggacgcccttaactttgccaacgaaggcaaactggtgatcgccgttgaacgcaacgcggcagagcaagtgctggcagcgttacattcccatccactggggaaagacgcggcgctaattggtgaagtggtggaacgtaaaggtgttcgtcttgccggtctgtatggtgtgaaacgaaccctcgatttaccacacgccgaacctcttccgcgtatatgctaataaaattctaaatctcctatagttagtcaatgaccttttgcaccgctttgcggtgctttcctggaagaacaaaatgtcatatacaccgatgagtgatctcggacagcaagggttgttcgacatcactcggacactattgcagcagcccgatctggcctcgctgtgtgaggctctttcgcaactggtaaagcgttctgcgctcgccgacaacgcggctattgtgttgtggcaagcgcagactcaacgtgcgtcttattacgcatcgcgtgaaaaagacaccccattaaatatgaagacgaaactgttctggcacacggtccggtacgccgcattttgtcgcgccctgatacgctgcattgcagttacgaagaattttgtgaaacctggccgcagctggtcgcaggtgggctataccccaaatttggtcactattgcctgatgccactggcggcggaagggcatatttttggtggctgtgaatttattcgttatgacgatcgtccctggagcgaaaaagagttcaatcgtctgcaaacatttacgcagatcgtttctgtcgtcaccgaacaaatccagagccgcgtcgtcaacaatgtcgactatgagttgttatgccgggagcgcgataacttccgcatcctggttgccattaccaacgcggtgctttcccgcctggatatggacgaactggtcagcgaagtcgccaaagaaatccattactatttcgacattgacgatatcagtatcgtcttacgcagccaccgtaaaaacaaactcaacatctactccactcactatcttgataaacaacatcccgcccacgaacagagcgaagtcgatgaagccggaaccctcaccgaacgcgtgttcaaaagtaaagagatgctgctgatcaatctccacgagcgggacgatttagccccctatgaacgcatgttgttcgacacctagggcaaccagattcaaaccttgtgcctgttaccgctgatgtctggcgacaccatgctgggcgtgctgaaactggcgcaatgcgaagagaaagtgtttaccactaccaatctgaatttgctgcgccagattgccgaacgtgtggcaatcgctgtcgataacgccctcgcctatcaggaaatccatcgtctgaaagaacggctggttgatgaaaacctcgccctgaccgagcagctcaacaatgttgatagtgaatttggcgagattattggccgcagcgaagccatgtacagcgtgcttaaacaagttgaaatggtggcgcaaagtgacagtaccgtgctgatcctcggtgaaactggcacgggtaaagagctgattgcccgcgcgatccataatctcagtgggcgtaataatcgccgcatggtcaaaatgaactgcgcggcgatgcctgccggattgctggaaagcgatctgtttggtcatgagcgtggggcttttaccggtgccagcgcccagcgcattggtcgttttgaactggcggataaaagctctctgttcctcgacgaagtgggcgatatgccactggagttacagccgaagttgctgcgtgtattgcaggaacaggagtttgaacgtctcggcagcaacaaaatcattcagacggacgtacgtttaattgccgcgactaaccgcgatctgaaaaaaatggtcgccgaccgagagttccatagcgatctctattaccgcctgaacgtattcccgattcacctgccgccactacgcgagcgtccggaagatattccgctgctggcgaaagcctttaccttcaaaattgcccgtcgtctggggcgcaatatcgacagcattcctgccgagacgctgcgcaccttgagcaacatggagtggccgggtaacgtacgcgaactggaaaacgtcattgagcgcgcggtattgctaacacgcggtaacgtgctgcagctgtcattgccagatattgttttaccggaacctgaaacgccgcctgccgcaacggttgtcgcccaggagggcgaagatgaatatcagttgattgtgcgcgtgctgaaagaaaccaacggcgtggttgccgggcctaaaggcgctgcgcaacgtctggggctgaaacgcacgaccctgctgtcacggatgaagcggctgggaattgataaatcggcattgatttaactgcaaattgccggacagatctgcctgtccggcatactattcacgaggttttttcggacgatatttttccggcagttctggtaccggacgcttgtcatcgatgagatgacgcacggttaagatcggatgacgccacagcattctcggcccggcccaacgcataatctgtttcatctcttcacgctttgcaggctggtaacagtgcaccggacactgcttacaggctggtttctcttcgccgaacacacatttatccagccgcttttgcgcgtaaacaaacaacgcctcgtaatgctccggctccgctgacgcctgcgggcatttcgcttgataaagatcgatcatttttttaatcgtcagtttttcacgagagatacgcttgccggacatgctgcctccatactcttaaggtgtatttatattacaacttaatttgaaaggggactatggctctgaaggaggaggtttattcaaccgacgcaattttgcgtacttgcttcataagcatcacgcaaaagctgcaaaacagcatctttcccggaaccagcatcaagaactcgccgttcgcttcttcccctgaaatgattaactccggtatcatgtgcgccttatgtgattacaacgaaaataaaaaccatcacaccccatttaatatcagggaaccggacataaccccatgagtgcaatagaaaatttcgacgcccatacgcccatgatgcagcagtatctcaggctgaaagcccagcatcccgagatcctgctgttttaccggatgggtgatttttatgaactgttttatgacgacgcaaaacgcgcgtcgcaactgctggatatttcactgaccaaacgcggtgcttcggcgggagagccgatcccgatggcggggattccctaccatgcggtggaaaactatctcgccaaactggtgaatcagggagagtccgttgccatctgcgaacaaattggcgatccggcgaccagcaaaggtccggttgagcgcaaagttgtgcgtatcgttacgccaggcaccatcagcgatgaagccctgttacaggagcgtcaggacaacctgctggcggctatctggcaggacagcaaaggtttcggctacgcgacgctggatatcagctccgggcgttttcgcctgagcgaaccggccgaccgcgaaacgatggcggcagagctgcaacgcactaatccggcggaactgctgtatgcagaagatttcgccgagatgtcgctgattgaaggccgtcgcggcctgcgccgtcgcccgctgtgggagtttgaaatcgacaccgcgcgccagcagttgaatctgcaatttggcacccgcgatctggtcggttttggcgtcgagaacgcgccgcgcggactttgtgctgccggttgtctgttgcagtatgcgaaagatacccaacgcacgaccctgccgcatattcgttctatcaccatggaacgtgagcaggacagcatcattatggatgccgcgacacgtcgtaacctggaaattactcagaacctggcgggcggtgcggaaaatacgctggcttctgtgctcgactgcaccgtcacgccgatgggtagtcgtatgctgaaacgctggctgcatatgccagtgcgcgatacccgcgtgttgcttgagcgccagcaaactattggcgcattgcaggatttcaccgccgagttgcagccggtactgcgtcaggtcggcgacctggaacgtattctggcacgtctggctttacgaactgctcgcccacgcgatctggcccgtatgcgccacgctttccagcaactgccggagctgcgtgcgcagttagaaactgtcgatagtgcaccggtacaggcgctacgtgagaagatgggcgagtttgccgagctgcgcgatctgctggagcgagcaatcatcgacacaccgccggtgctggtacgcgacggtggtgttatcgcatcgggctataacgaagagctggatgagtggcgcgcgctggctgacggcgcgaccgattatctggagcgtctggaagtccgcgagcgtgaacgtaccggcctggacacgctgaaagttggctttaatgcggtgcacggctactacattcaaatcagccgtgggcaaagccatctggcacccatcaactacatgcgtcgccagacgctgaaaaacgccgagcgctacatcattccagagctaaaagagtacgaagataaagttctcacctcaaaaggcaaagcactggcactggaaaaacagctttatgaagagttgttcgacctgctgttgccgcatctggaagcgttgcaacagagcgcgagcgcgctggcggaactcgacgtgctggtgaacctggcggaacgggcctataccctgaactacacctgcccgaccttcattgataaaccgggcattcgcattaccgaaggtcgccatccggtagttgaacaagtactgaatgagccatttatcgctaacccgctgaatctgtcgccgcagcgccgtatgttgatcatcaccggtccgaacatgggcggtaaaagtacctatatgcgccagaccgcactgattgcgctgatggcctacatcggcagctatgtaccggcacaaaaagtcgagattggacctatcgatcgcatctttacccgcgtaggcgcggcagatgacctggcttccgggcgctcaacctttatggtggagatgactgaaaccgccaatattttacataacgccaccgaatacagtctggtgttaatggatgagatcgggcgtggaacgtccacctacgatggtctgtcgctggcgtgggcgtgcgcagaaaatctggcgaataagattaaggcattgacgctgtttgccacccactatttcgagctgacccagctaccggagaaaatggaaggcgtcgccaacgtacatctcgatgcgctggagcacggcgacactatcgcctttatgcacagcgtgcaggacggcgcggcgagcaaaagctacggtctggcggttgctgctctggcgggcgtaccgaaagaggttattaagcgcgcacggcaaaaactgcgtgagctggaaagcatttcgccgaacgccgccgcgacgcaagtggatggtacgcagatgtctttgctgtcagtgccagaagaaacttcgcctgcggtcgaagcactggaaaatctcgacccggattcactgactccgcgtcaggcgctggagtggatttatcgcttgaagagtctggtgtaataacaattcccgatagtcttttgctatcgggaatattaacgacaactgacgaatcaaataaaaataccctgtataataggaaagcttattttacagggtaaaaccatgccatctacacgctatcaaaaaatcaatgcccatcactatcgccatatatgggtcgttggtgatattcatggtgaatatcagttattacaatcccgttaacatcaactctctttttaccctgaaaccgacttacttatttccacaggcaataatattgatcgtgggccgaagagtcttaacgtgctgcgcctgctaaaccaaccctggtttacgtcggttaaaggcaaccacgaagcgatggcgttggatgcattcgaaactggcgatggaaatatgtggcttgccagcggtggtgactggtttttcgatttaaatgattcagagcaacaagaggcaatagatctgttgctgaaattccatcaccttccacatattattgaaatcattaatgacaacataaaatatgccatcgcacggtaatgactccaacttattgatagtgttttatgttcagataatgcccgatgactttgtcatgcagctccaccgattttgagaacgacagcgacttccgtcccagccgtgccaggtgctgcctcagattcaggttatgccgctcaattcgctgcgtatatcgcttgctgattacgtgcagctttcccttcaggcgggattcatacagcggccagccatccgtcatccatatcaccacgtcaaagggtgacagcaggctcataagacgccccagcgtcgccatagtgcgttcaccgaatacgtgcgcaacaaccgtcttccggagactgtcatacgcgtaaaacagccagcgctggcgcgatttagccccgacatagccccactgttcgtccatttccgcgcagacgatgacgtcactgcccggctgtatgcgcgaggttaccgactgcggcctgagttttttaagtgacgtaaaatcgtgttgaggccaacgcccataatgcgtgcagttgcccggcatccaacgccattcatggccatatcaatgattttctggtgcgtaccgggttgagaagcggtgtaagtgaactgcagttgccatgttttacggcagtgagagcagagatagcgctgatgtccggcagtgcttttgccgttacgcaccaccccgtcagtagctgaacaggagggacagctgatagaaacagaagccactggagcacctcaaaaacaccatcatacactaaatcagtaagttggcagcatcaccccatcgcacatgcagattatccgggtgatgaatatcagtttggtaaagaaatagcagaaagcgaattactctggcctgttgatcgtgtgcagaaatcgcttaatggcgagttacaacaaataaacggcgctgattattttatatttggacatatgatgtttgataacattcagacgttcgctaaccagatttatattgataccggcacgccgaaaagcgggcggctgtcattttataaaataaagtagtctcatgcttcttctgtgaagcatgagtaaccaaatgttattgcaggccattattcatttttcgctaccagcaaagagagatcctgcttcgccagcgcgcgactggcactctccggcaaaccgtcgtctgtgataatctgatcaaactcgcttaatggtaacgccagccatgtcgccacctgaccatatttcgtcgcatcacagaccaaaactcgctggcggctggcactggcaatcgcccgtttcaccgtgactttatcttccgctggcgtagaaatcccccgcacactccatgacgatgcagaaataaaagcctgatcaatcatcaggctgcgcagcatggtcgcagcggcttccccgacacaggaacggttttcccgacacactgcaccgccagtgtgaataattgtgcaattactgttgtcgagcaagtagttcgcaataacgaaatcgtttgtgaccacagtcagtgactccatgtgaatcagatgctgtgctatcgctaacgtggtcgttcccgcatccagatagatacaacttcccggctgaacaagacttgccgccagcttgccaatagccgctttttgcgtcattgccagcgcagtttttacctgatgagaaggttcatgcgccacgcgtcccggagactggacgcctccggacaccagcacaacggctccctgctgctccagtttttgtaaatcccgacgaatggtcatatgtgacacattcattctgtccgttagttcagcaatactgacaatgcctttttcagctaccatctcaaggatgatttggcgacgctctacgggtatcaacttttgctccttcctttgtcctgctgacattctacgctatttgcctgcgaaacgtgcgcggcgcaactaacgcttagttcacataaaataacacacaatgttaatttatgtgaatcagctcaccatatcgttatcttccagcgcttatattcacaatatcaaacaaaatatcacttaaattaacaatgagagcagatgaaaacgggatctgagtttcatgtcggtatcgttggcttagggtcaatgggaatgggagcagcactgtcatgtgtccgcgcaggtctttctacctggggcgcagacctgaacagcaatgcctgcgctacgttgaaagaggcaggtgcttgcggggtttctgataacgccgcgacgtttgccgaaaaactggacgctctgctggtgctggtggccaatgcggcccaggttaaacaggtgctgtttggtgaaacaggcgttgcacaacatctgaaacccggtacggcagtaatggtttcttccactatcgctaaatagctgcgcggaatagtagatcactttgagggaacttagcccggattgtgcgatctgatcaatcgccaaatcaaaacaaatcaccaaccggactgagcaatgccgatcatagcaccaatttcccgtgacgaacgacgcctgatgcagaaagccatccataaaacacacgataaaaattatgcccgcagactgactgccatgctgatgctgcaccggggcgaccgtgtcagcgacgttgccagaacgctctgctgcgcccgttcctctgttggacgctggattaactggttcacgcagtcgggtgttgagggactgaaatcattacctgccgggcgtgcccgtcgctggccgtttgagcatatctgcacactgttacgtgagctggtaaaacattctcccggcgactttggctaccagcgttcacgctggagtacagaactgctggcaataaaaatcaatgagataaccggttgccagttaaatgccggaaccgttcgccgctggttgccgtctgcggggattgtgtggcgaagggctgcgccaactctgcgtatccgtgacccgcataaagatgaaaagatggcagcaatccataaagcactggacgaatgcagcgcagagcatccggtcttttatgaagatgaagtggatatccatcttaatcccaaaatcggtgcggactggcaactgcgcggacagcaaaaacgggtggtcacgccgggacagaatgaaaaatattatctggccggagcgctgcacagcgggacaggtaaagtcagctgtgtgggcggcaacagcaaaagttcggcgctgttcatcagcctgctgaagcggcttaaagcgacataccgtcgggcgaaaaccatcacgctgatcgtggacaactacattatccacaaaagccgggaaacacagagctggctgaaggagaacccgaagttcagggtcatttatcagccggtttactcgccatgggtgaatcatgttgaacggctatggcaggcacttcacgacacaataacgcgtaatcatcagtgcagctcaatgtggcaactgttgaaaaaagttcgccattttatggaaaccgtcagcccattccccggaggcaaacatgggctggcaaaagtgtagcggtattaagcgcagctatttagtgctgatgcgcaagaaattgctaccgctctggctggattcgatctggaaatgctggatgcgccagtttctggtggtgcagtaaaagccgctaacggtgaaatgactgtcatggcctccggtagcgatattgcctttgaacgactggcccccgtgctggaagccgttgccggaaaagtttatcgcataggtgcagaaccgggactaggttcgaccgtaaaaattattcaccagttgttagcgggcgtacatattgctgccggagccgaagcgatggcacttgcagcccgtgcggggatcccgctggatgtgatgtatgacgtcgtgaccaatgccgccggaaattcctggatgttcgaaaaccggatgcgtcatgtggtggatggcgattacaccccgcattcagccgtcgatatttttgttaaggatcttggtctggttgccgatacagccaaagccctgcacttcccgctgccattggcctcaacagcattgaatatgttcaccagcgccagtaacgcgggttacgggaaagaagacgatagcgcagttatcaagattttctctggcatcactctaccgggagcgaaatcatgatcaagattggcgttatcgccgatgattttaccggcgcgacggatatcgccagttttctggtggaaaacggtctaccaacggtacaaattaacggtgttccaacaggtaaaatgccggaagcaatcgacgcactggtgatcagcctgaaaacgcgctcctgtccggtggttgaagccacacagcaatcgctggcggctctgagctggttgcaacagcaaggttgcaaacagatctatttcaaatactgctctactttcgacagtacggcgaaaggtaatattggcccggttaccgatgccttaatggatgatctcgacacgccgtttacggtcttctctccggccctgtcggtcaacggacgtacggtttatcaggggtatttgttcgtaatgaatcaactgctggccgaatccgggatgcgccatcacccggtaaatcccatgaccgacagctatcttccccgtctggttgaagcgcaatccacagggcgctgcggcgtcgtttcggcacatgttttcgaacaaggcgtggatgccgttcgtcaagagctggctcgcttacagcaagagggctaccgctacgcggtgcttgatgcgctgaccgaacaccatctggaaattcagggagaagccttgcgcgatgccccactggtaacgggcggttctggtctggcgattggcctggcccggcagtgggcgcaagaaaacggtaaccaggctcgcgaagcagggcgtccgctcgctgggcgcggcgtagtgctctccggttcatgctctcaaatgaccaaccgccaggtggcacattaccgtcaaattgcaccagcccgtgaagttgatgtggcacgctgcctctcaaccgaaactctggccgcttatgcacacgaactggcagagtgggttctgggccaggaaagtgtacttgctccactggtttttgccaccgccagcactgacgcattggcagcaattcaacagcaatacggtgcacaaaaagccagtcaggcagtagaaactctgttttctcaactagcggcgcggttagcagcggaaggcgtgacacgctttattgtcgcaggcggtgagacctccggcgtagtcacacagagcctgggcataaaagggtttcatattggcccaaccatttcccccggcgtgccgtgggtaaacgcactgtataagcctgtctcactcgcccttaaatctggcaacttcggtgatgaagcctttttttcacgagcccaaagagagtttttatcatgagcgatttcgcaaaagtagagcagtctttgcgagaggagatgacgcggattgccagttcattctttcagcgcggctatgcaaccggttcggctggcaatctgtcgctgcttttacctgacgggaatttactggcgacaccgacaggttcatgcctgggcaatctcgatccgcagcggctttccaaagtcgccgcggatggcgaatggttaagtggtgacaaaccctcgaaagaggtgctctttcatctggcgctgtatcgcaacaatccgcgctgtaaagcggtggtgcatttgcacagcacatggtcgacggcgctttcctgcctgcaagggctggacagcagcaacgttattcgtccgttcacaccatacgtggtgatgcggatgggaaatgtcccgctggtgccttattaccgaccgggcgataaacgcatcgcacaggatctggcggaactggcagcagacaatcaggcttttttactggcaaatcatggcccagtggtttgcggtgaaagcctgcaagaagccgccaacaatatggaagagctggaggaaacggcaaagctgatttttattctcggtgaccgcccgatccgttatctgaccgcaggtgaaattgcggaattaaggagttaatgcaatgcctcgttttgcagctaatttatccatgatgttcaccgaagtgccttttattgaacgcttcgccgcagcgcgaaaagccgggttcgatgctgtggaatttctgtttccctatgactactccaccctgcaaatccaaaagcaactggagcaaaaccatctgacactggcgctgttcaataccgctcccggagatattaatgcgggggaatggggattatccgcccttcccggacgtgagcacgaagcacacgcagacatcgacctggcactggaatatgcattggcgctcaattgtgaacaagtccatgtgatggcaggcgtcgtgcccgctggcgaagacgctgaacggtaccgggcagtatttatcgataatctccgctacgctgccgaccgctttgcgctacacggcaagcgaatattagttgaagcactcagccccgacgttaagcctcattatctcttctccagccagtatcaggcactggctattgttgaagaggttgcgcgagataacgtgtttattcaactagatacttttcatgcgcaaaaagtagatggcaacctgacgcatttaatccgcgactacgctgggaaatatgcgcacgtacaaattgccggactacctgatcgacatgaaccggacgatggagaaatcaactatccgtggctgttccgcctgttcgatgaggtgggatatcagggctggatcggttgtgaatataaacctcgtggcctcaccgaagaagggcttggctggtttgacgcctggcgctaattcgttaaatccctaattacaacgtacccatacatccccccatctacggatggggtaggttaactataactttcagacagggtttcccatgtccacaattacattgttatgcattgcgttagctggcgtaatcatgctgttgctgctggtcatcaaggcaaaggtacaaccattcgttgctctgctcctcgtcagcctgttagtcgcacttgcggcgggtataccggcgggcgaagtgggtaaagtgatgatcgccgggatgggcggtgtgcttggttccgtcactattattattggtctgggcgctatgctggggcgtatgatcgaacactctggtggtgcagagtcactggctaattatttcagtcgcaagttaggtgacaaacgaactatcgctgcgctgactctggcagcgttcttcctcggtattcccgtcttctttgatgtcggctttattattcttgcgccaatcatttacggttttgccaaggttgccaaaatatcgccactcaaatttggcctgcctgtcgctgggatcatgctaactgtacatgtggcggtaccgccgcatccaggccctgtcgccgcagcggggttactccacgcagacatcggctggctaaccatcatcggtattgcgatttctattcccgtagggattgttggctactttgcagcgaaaataatcaataagcaccaatatgcgatgtcggtggaagtactggaacagatgcaactggctccggccagtgaggaaggcgcgacaaaattaagcgataaaataaatccaccgggcgtcgcgctggtcacctcgctaattgttattcctatcgcgattatcatggcgggtacggtttccgcaacactgatgccgccttcgcatcccctgcttggtacgctacagctgatcggctcaccaatggtagctctaatgattgcgctggtgctggcattctggttattggctttacgtcgcggctggagcttacaacacaccagcgacattatgggctcagcccttcccactgcggcggtagtgattttggttactggtgctggaggggtatttggcaaagtgctggtggaatcgggcgtcggcaaagcccttgccaacatgctacaaatgattgacctgcctctgttaccagccgcatttattatttcactggcgctgcgtgcatcgcaggggtcagcaaccgtagcaatcctgacaaccggcgggttactctcagaagcggtgatgggattgaatccgattcagtgcgtattggtgacgctggcagcctgctttggtgggcttggggcgtcacatattaatgactcagggttctggattgtgaccaaatatctggggttgtcggtagcagacggtctgaaaacctggacagtgttaacgaccattctcggttttaccggattcttaattacctggtgcgtatgggcggtaatttgaccttaataaaaaggtccgatgggcatcggaccttttattgtgcacagaaaaggccagcctcgcttgagactggcctttctgacagatgcttacttactcgcggaacagcgcttcgatattcagcccctgcgtttgcaggatttcacgcaaacggcgcaggccttcaacctgaatctggcgaacacgttcacgggtgaggccaatttcacgacctacatcttccagtgttgccgcttcgtaccccagcaaaccgaatcgacgtgccagtacttcacgctgtttggcgttcagctcgaacagccatttgacgatgctctgcttcatatcgtcatcttgcgtggtatcttccggaccgttctctttttcatcggccaggatgtccagcaacgctttttcggaatcaccacccagcggggtgtctaccgaggtaatgcgctcgttaagacgaagcatacggctgacgtcatcaactggcttatccagttgctctgcgatctcttccgcacttggttcatggtccagcttatgggacaactcacgtgcggttcgcaggtaaacgttcagctcctttacgatgtgaatcggcaaacgaatagtacgggtttggttcataatcgcccgttcaatcgtctggcgaatccaccaggttgcgtatgttgagaagcggaaaccacgttccgggtcaaacttctctaccgcgcggatcagccccaggttgccctcttcgataaggtccagcaacgccagaccacgattgccataacggcgggcaatttttaccaccagacgcaagttactctcgatcatccggcggcgagaggcgacatctccacgcagtgcgcgacgcgcaaaataaacttcttcttcggccgttaacagtggtgaataaccaatctcaccaaggtaaagctgagtcgcgtccaacacacgctgtgtggctccctgcgataacagttcctcttcggccaaatcgttatcactgggttcctcttctactaaggccttttcgtcaaaaacctcaactccgttctcatcaaattccgcatcttcatttaaatcatgaactttcagcgtattctgactcataaggtggctcctacccgtgatcccttgacggaacattcaagcaaaagcctggttccgccgatttatcgctgcggcaaataacgcagcgggtttacggatttccccttgtaacgaatttcaaaatgcaagcgtgttgaactggttccggtgctacccatggttgctattttttgccccgccttcacttcttgttgttcccggaccagcattgtgtcgttatgggcgtaggcactcaggtaatcatcattatgtttgatgataatcagattaccgtagccgcgcagcgcgttaccggcataaacaacgcggccatctgcggtcgcgataattgcctgtcctttgctgcctgcgatatcaatccccttgttgcccccctcagaagcgccaaaggtttcgatcactttgccctcagtcggccagcgccaggtggagataggcgtactggttgatgtactgctgacagtcggctcggttgtgcttgctgttggtaccgttacaggcgctgtgactgtggtcgcagttggcttgttgttcggcaacattttgttagcactctgttcacccgaagactcagaatacgtaattgtcggttgcgacgcaacagcaacggtggaattttgtgcaggcttgatcacaactccttgctctgctgcgtcggcctgggtaatggcatttccgccagtgattggcgtaccggaagcattacccacctgcaaggtctgaccaacgttcagcgcgtatggtgcctgaatattgttgcgctgagcaaggtcacggaaatcgttgccagtaatccaggcgatatagaaaagtgtgtcgccttttttcacggtataggtactgccgctataactgcctttcggaatgttcccatactgacggttatagacgatgcgtccgttttccatctgtaccggctgctgagctactggctgcactggctggatttgcggttgttgagtagcctgaatttgtggctgctgtaccggctgaatttgcggttgctgggctgtagacgtcgtccccattttcggcggcggcgtaatcaacataccagaattagtatttgcaggcgcattgccattaacggagctgaccggtgccggtggatttgaagtgtcagaacagcctgccagccatagcgaaaccagtgacaaagcagcaatgcggcgaacggtgaattttgggcttcccgcgctcatttatcccccaggaaaaattggttaataaccagtgacataattaccgtgcaaggcaccctactgaacactggaaaagatgttcacgatacgctgacctgcggcaaaataaccaggaaaaatccaggtatttcctcacgttttaagccagctcacccttcactaaagggacaaagcgcacggcctccacggtatcgataataaattcgcctccccgacgacgcacccgtttcaaatactggtgctcctcccctacgggtaagacgagaatcccgccttcgtccagctgcgtcattagcgcagttggaatttccggcggtgccgccgtaacaatgatagcgtcaaacggcgcacgtgcctgccaaccttgccatccatcgccatgacgggttgaaacattatgtaaatcaagatttttcaggcggcgacgtgcctgccactgcaagcctttaatccgttcaaccgagcaaacatgctggacaagatgcgctaggattgccgtttgatatcccgaaccagtgccaatttccagcacccgcgactgcggcgtcagctcgagtaattcggtcattcgcgccaccatatacggctgcgaaattgtctgcccctgacctatcggcaaggcgatattgtcccaggctttttgttcaaacgcttcatcaacgaatttttcacgcggcacggcggcaagtgcattcagcacctgctcatcctgaataccttgcgcacgtaattgatccagaagtgcttgtacgcgtctgcttaccattgcgtgccaactcccacgctgtttaaccagtctgaaaccacatcttgcgcgctatgcgcagttaaatccacatgcagcggcgtgatggagacatagccctcatctaccgcagcaaaatcggtccccggaccggcatcacatttaccgcccggcgggccaatccagtacagcgtattgccgcgcggatcttgctgcgggatcacctgatctgccggatgtcgtgtaccgcagcgcgtcacgcgaatacctttgatttgatccaagggtaaatccggaacgttaatattaagaatacgtccggtgcgcagcggctctttacacagtgcgcgcaaaattgaacaggttaccgccgcggcagtgtcgtaatgtttatgcccgtcaagcgagacggccagcgccggaaaacctaaatgacggccttccatcgcggcggctaccgtaccggaataaataacgtcatcccccagattcggcccggcgttaatgccggacacaacaatgtccgggcgcggacgcatcagagcattcacgccaagatagacgcaatcggtcggggttcccatttgcacagcaatatcaccattttcaaaggtaaacgtgcgcagggaggattccagtgtcagagaatttgaagcgccgctgcggttacgatcgggggcgaccacctgaacgtcagcaaactcacgcaaggctttcgccagcgtttgtataccgggtgcatgtaccccgtcatcattactcagcaatatgcgcataatcacctgttgtgttgataagttccctgacaacgctggttgcaaaactacccgccggaagccagaaacggatctctacggtgacgtcatcccaccaattccagcttaattgttgcggatacagcaacatcgctctgcgcgcggcttcaactttttcgcgcaccagtaaagcttgtaattcagtttctgcggcgacagctgccttttcgaatgccagcgcttcacgctgagttccccattcgccactacccggcaatgcggcggttatcatcagctctttatcgttgacgcgacgctgtaattccgccagttcttcggtggttgcgacaaaccagctaccacgtccggctaattgtagcgcatcgccgtcaacaacttgattaacgtctgcttttttgaggcgctcagcaacaatctgattaaacaacgcactgcgggctgccgacaaccaaaaactccgtttattgcgatcgcgcaccggagtattggtttgcgcccagcgctgcgccccctgcaagttgctaccgccaatcccaaaacgttgggcaccgaagtagttcggtacaccttttacgcaaatatcgatcagacgttgttcaacgtcatcgcgattgctcacttcgcgcagaaccagggtaaaggcgttacctttcagcgcgcctaaacgcagcttgcgcttgtgccgcgcatactccagcacctggcagccttccagttgaaaggcgctcagatcgggcatttccttgcctggcacgcgagcgcataaccactgttccgtaacagcatgtttgtctttttgcccagcgaagctgacttcacgggcatgaattttcaggaatttcgccagtgcatccgccacaaaacgggtattgcagccgtttttgaggattctaaccagaatatgctcaccttcaccatcaggctcaaagcccaaatcttccaccaccacaaagtcttccggattggctttcagcagcccggtgccttgcggtttaccgtggaggtaagtgagattatcaaactcaatcattttgttgccttaatgagtagcgccaccgcttcacaggcaatcccttccccacgtccggtaaatccaagtttttccgtagtagtggctttcacgttaacatcatccatatggcagccgagatcttcggcaataaacacgcgcatttgtggaatgtgcggcaacatcttcggtgcctgagcgataatagtgacatcgacgttgcccagggtataacccttcgcctgaatacgacgccaggcttcgcgtagcagctcgcggctgtcggcacctttaaatgccggatcggtatccgggaacagcttgccgatatcccccagcgccgccgcgccaagcaatgcatcggtcaacgcatggagcgccacgtcgccatcagaatgcgccagcaatcctttttcgtaaggaatgcgtacgccaccaatgataattgggccttcaccgccaaaggcatgtacgtcaaaaccgtgtccaattcgcattatgtattctcctgatggatggttcgggtgaggtaaaactcggccagtgccaaatcttccgggcgcgtgactttaatgttatccgcacggccttcgaccaactgaggatggaatccgcaatattccagcgccgaggcttcgtcggtaatagtcgcgccttcatttagagcgcgcgtcagacagtcatgtaacagctcacgagggaaaaattgcggcgtcagcgcgtgccataagccgttgcgatcaacggtatgagcaatggcatttttgcccggttcggcacgtttcatcgtatcgcgcactggtgcggctaggatccctcccgtgcggctggtttcgctcaacgccaacaatcgcgcgaggtcatcctgatgcagacaaggacgagcggcgtcatgcaccaatacccactgcgcgtcgccagcggctttcaaacctgccagcacggaatcggcacgctcatcaccgccatctacaacggtgatttgcggatgattcgccagaggaagttgtgcaaaacggctatcgccaggacttatggcaatgacgacacgtttcacccggggatgcgccagcagcgcatgcaccgagtgttcaagaatggtttgattaccgattgagagatattgcttaggacattccgtttgcattcgacggccaaatccggccgccggaaccacggcgcaaacatccaaatgagtggttgccatgttaattcccgggctgatttatcgattgttttgccccgcagactgtgcgcgcttcgacgcgtcaggcaccagacgataaaaagtttcgcccggcctggtcatgctgagttcattacgcgcacgctcttcgagcgcctcctggccgccattgagatcgtcaatttcggcaaaaagttgatcgtttcgcgctttaagtttcgcgtttgtagcttgctgtgccgccacatcatcattgacgcgggtatagtcatgtataccgttcttaccgaaccacagcgaatactgtagccagaccagaatagccagcaacagcagcgttagtttacccatcctgccccctgaaaaacggcatcatcatcccatgcatccgaagacgactctacatcctctgttggggataccgcgacaacgcgggcaaatgtaccacatttgtccattgttacgtatacccagggcgtgcagaacataatctcattattagttacggtttgaattatgaacagaggagacaagaaagtacaaattagcccagtagccacataaacagtgcgccaaacataatgcctactgtcaccagggtgaaaacaatactgtagcgtagctttccgtccatcaatgaatgcagcgcaatccccaccactaccgcgacgggcatcagcgccagaaagaaaggccaggtgtagataaagaagaacagcgtgttagagccataaatcaacatcggcatcgccagcgcaaataaccaggagataaaaccgaccacggcaccaggcagtgaccatgtggtttcttcatcctcagtaaggctgtcgttatttgttagtgtaatgttatggctattacgcatatttgatcctgttactttgacgaaccgggcatggaaacccggtggtgtctcaggatctgataatatcgttctgtctcaacagatctaataattgctgtaccaaatttgttactaattgttcaccattgagatgaatttctgccgattcaggcgcttcgtaaacggaatctattcccgtaaagttgcgcagttcaccggcacgcgctttcttatataagccttttggatcgcgggcttcgcaaatcgccagcggcgtatcgacaaacacttcgataaagcgcccttctcctacgcgttcacgaaccatctggcgttcggcgcggtgtggcgagataaatgcggtcagcaccaccagtccggcttcaaccatcaaattcgccacttcaccgacgcgacggatattctctttacgatcggcatcgctaaaaccgagatcgctgcataatccgtggcgaacattatcgccatccagcagatacgtactgacgccgagtttatgtaacgcctcctccagcgccccggcgaccgttgatttaccggacccggagaggccggtaaaccacagcactacaccacgatgaccgtggtgtagctcgcgttgttgcacagtgaccggatggctatgccagacgacgttttcgtcatgcagcgccattatttatcccccagcaaatcgcgcgcgccccagtgcggaaagtggcgacgaaccagagcattcaattccagttcgaatgcactgaattcagatggcgcagcagttgcctggctaactggctcgtgcaccataccggcacccacggtcacattgctcaggcgatcgataaaaatcagcccacccgtcaccggattttgttgataacgatctaacaccagcggctcgtcaaaagtgagatccacgaggccgatcccattcagtggcaggttttcaacttcacgctgggtaaggttattaatatcaacctgatagcgaatgccatcaacacgcgcgcgcgtcttcttaccggcaattttgatgtcgtaactctgccctggagaaagcggctgttccgccatccataccacatccaccgacgcgctctgcaccgccggtaacgcttcgtctgccgccagcagcagatcgccacggctgatgtcgatctcatccgtcagcaccagggtgatcgcttctccggcaaaggcttcttcgcgatcaccatcaaaagtcacgatccgcgcgacgtttgattccacaccagagggcagcacttttacacgttgcccgacttccacgcgaccggatgccagcgttccggcgtagccacgaaaatcgagattcgggcgattaacgtactgcaccgggaagcgcattggctgagcatccaccactcgctggatctccacggtttccagcacttcgagcagtgtcggaccgctgtaccacggcatactttcactttgcgatgccacgttgtcgccttccagtgcagagagcggcacaaagcggatatccagattacccggcagctgcccggcaaaggtcagataatcttcacgaatacgggtgaacgtctcttcactgtaatccaccagatccattttgttgatcgccacgaccagatgtttgatccccaacagtgtggagataaaactgtgacgacgggtttgatcgagcacgcctttacgggcatcgatcagtaagatcgccagttcacatgtcgatgcgccagtcgccatattgcgagtgtactgctcgtgccctggggtgtcggcgataataaatttacgcttctcggtagagaaatagcggtaggccacatcaatagtgatgccctgttcgcgctcagcttgcaggccgtccaccagcagagccagatccagcttttcgccctgggtaccgtgacgcttactgtcgttatgcagcgatgagagctgatcttcatagatttggcgagtatcgtgcagcaggcgaccaatcagagtgcttttgccgtcatcgacgctgccacaggtcagaaaacgcagcaggcttttatgttgttgcgcaatcatccaggcttcgacgccgccttcattggcgatttgttgtgcaagtgcggtgttcatcttaaaaatacccctgacgttttttcagctccatagatcccgcctggtcgcggtcaatcacgcggccctgacgttcactggtggtggaaaccagcatctcttcgatgatttccggcagtgtttgtgcatttgactccaccgcaccggtcagcggccagcagcccagcgtacggaaacgcaccatccgttttttaatcacttcgcccggttgcaggtcgatacggttgtcatcaatcatcatcaacataccgtcgcgttccagaaccggacgttccgcagcgagatacagcggcacaatgtcgatattttccagccagatgtattgccagatatcctgctcggtccagttagagagtgggaagacgcggatgctttcgcctttgttaatttgcccgttgtagttgtgccacagctccgggcgctgatttttcggatcccagcgatggaagcggtcacggaaagagtagattcgctctttagcgcgggatttctcttcgtcacggcgcgcaccaccgaaggcggcatcaaaaccgtatttgttcagcgcctgtttcaggccttcagttttcataatatcggtatgtttcgcgctgccgtgcacgaatggattaatccccatcgccacgccttccgggtttttatgcaccagcagctcgcagccgtaggctttcgccgtacgatcgcggaactcatacatctcgcggaatttccagccggtatcgacatgcagcaacgggaaaggcagcgtacctggataaaacgccttgcgcgccaaatgcagcatgacgctggaatctttaccgatagagtagagcatcaccggatttgagaattctgccgccacctcgcgaataatgtggatgctttccgcctccagttgccgcaggtgagtaagtcgtatttgatccataaccgttcctttgcaataccgctattttcttgccatcagatgtttcgactatagggagcgtaagagaacgaatgaaattaccaattagaatgagtagttccttaacggaataacgatttggcaaagctaatatcaaaaagtgcttaaggcaccggatttctggcgtttaggaagatttgaaattgttttagcgcagcggcagtttcatactatggcggtaaaaaaatttgcatggtatttaaggactcactatgttttccgcattgcgccaccgtaccgctgccctggcgctcggcgtatgctttattctccccgtacacgcctcgtcacctaaacctggcgattttgctaatactcaggcacgacatattgctactttctttccgggacgcatgaccggaactcctgcagaaatgttatctgccgattatattcgccaacagtttcagcaaatgggttatcgcagtgatattcggacatttaatagtcggtatatttatactgcccgcgataatcgtaagagctggcataacgtgacgggaagtacggtgattgccgctcatgaaggcaaagcgccgcagcagatcatcattatggcgcatctggatacttacgccccgctgagcgatgctgacgccgatgccaatctcggcgggctgacgttacaaggaatggatgataacgccgcaggtttaggtgtcatgctggaactggcagaacgcctgaaaaatacgcctaccgagtatggtattcgatttgtggcgaccagcggcgaagaggaaggaaaattaggcgctgagaatttactcaagcggatgagtgacaccgaaaagaaaaatacgctgctggtgattaatctcgataacttaattgttggcgataaattgtatttcaacagcggtgtaaaaacccctgaagcagtaaggaaattaacgcgcgacagggcgctggcaattgcgcgcagtcacggaatagccgcaacgaccaatccgggtttgaataaaaattatccgaaaggcactgggtgttgtaatgacgcagaaatattcgacaaagcgggcattgctgtactttcggtggaagcgactaactggaatcttgggaataaggatggttatcagcaacgcgcaaaaacagccgcattccctgcgggaaatagctggcatgacgtaagactggataatcaacagcatattgataaggcacttcctggaagaatagaacgtcgctgccgtgacgttatgcggataatgctacctctggtgaaggagttggcgaaggcgtcttgatgggtttgaaaatgggagctgggtgttctaccgcaggggcggggaattctaagtgatatccatcatcgcatccagtgcgcccggtttatccccgctggcgcggggaactcttactgcttggtatgcggaatcacaccctgaacggtttatccccgctggcgcggggaacaccctgacgcgccgcagtatttatctgctctggccggtttatccccgctggcgcggggaacacgggtgcgtgtggctgccagtgccggagaacggcggtttatccccgctggcgcggggaacacactaagcatacataactgtttttaaacaaatttattccgcatcaacaatctaccaactaaattaaaacatttccttatttttaaagaacggataacttattgattatcaacaggaagaaaagaaaccaaacgtaacccatccaaatccaccggaatacgtctgttttctccccaggtctgaaattcaaaacccgactcgatattggtcgcccaggccatcaccacatttccgcaaccagccagttgggtaatttgctgccagatcatctcccgaatacgttttgatgtatcaccaacatacacaccggcacgcacttccagtagccagattgcgagccgtccacgtaagcgcggagggacattttctgtaacaaccacgaccatgctcatccgccgcgcccccggtgaccactatcacccagcgtttcaggttcagggatggcaggcggtaacatatccggcgcgggttgtggtggttcaatttcacctgcagcaaggacttcctcaattaacggtattaatttgcccgttaacttagtgctacggaaaatatcgcgacaggctaatctgacttctttatcaggttctgcgggttgcctcgctgctatttcaaatgcctttggcacaaccgaatcaaatttaatgatatcggctatgtcataaacaaatgaaagcggtttgccactatggataaacccaatagcgggcgcatatcccgcggctaatactgccgcttcagatataccgtacagacatgatgtagcagcactgatgcagcgattcacaacatcgcctttttcccagtctttaggatcgtatttgcgaccattccatttcacaccatattgtttcgccagtaatgcatacgtctggcgaacgcgagatccctcaattccacgtaactgctccactgaacggcgagctggcggtggttcacgaaaacgtaattcatacattttgcgcaccaccttcaaccgtagatcttccgttaaagccagctttgcctagtagagtaatttatctgcccgcgcccctccgggttgtccggaggagtaaacgcgaacgcccgcttcaccgacccagaccagcagtgttcccaccgtggcggccagatggactgccgcgtgggaaactcttgttcccggttcgagcataatgcaggcgaccgatcccactggaatatgcgtgcggatcccggttttgtcgatcagcacgaaagcgccgtccagtacgtcgatttgaccgtactggaggaagatcatggaagtgcgatcttttaatgggatcgggctcagcggtacaaacgtcacgcctctgctccgggtttgatcagcatcagaccacaaccgaacgcccggcttttgccatacccctgactgagacgttgcagaaataacccaggagcggtgaccgtaagcatccccgtataatccacgctactgaactggatcagttgccgggagttttcccgccgcagttgctgttgtcggtaggcatcaaccgaagtatccagcagtgtaaaaccgcttctctccccctgcgctgccagccagtccagcgcagcctgttgttgatgcaaccagacatcacttccttccacctgccccctcacctgccgtttcgcctccatcagcaagtcgtggcgtttgcccgctttacaaattgttggattcgcccgcaggttgaaacaaagggattgtccggtacgcaactctggcgcaaatggtcggcattcgatggtgaaaatatcactttccgccgggcgttcctgcgacaggacaaaaaagcgcccccgttactttattcgtaccccttataatggggtgttagccagccagacccggcatgattactgcccccagtcgtccatgatccggggggtgatgtcaccgggtctggtggggcgctggtaaccgctaataggggtcaggtcaggcacttttgccgggaccgtctgtaacgtggatgccggtacctgctccccgtggttatctggttaacccatatacaagggagacagaatgaccgaatccagcgattacgaatccgtccaggtctttatcggcgttgatgtcggtaaagatacgcatcacgctgttgccattaatcgttcaggtaaacgcctgttcgataaagcattacccaacgacgaaaacaaactcaggtcgctaatatctgacctgaaacaacatggtcagatactgctggttgttgatcagccagctaccatcggtgcgttacctgtcgccgttgcccgctcagaaggagtccttgtcggatacctccctggactggccatgcgccgcatagccgacttacacgccggtgaagctaaaactgatgctcgtgacgctgccatcattgccgaagctgcccgtaccctgcctcacgcgctacgcacgctgaaactggctgacgagcaaatcgccgaactctccatgctctgcggcttcgatgatgatcttgccgcacagacaacgcaggccagcaaccgtatccgcggccttctgacccagatacatccggcactggagcgcgttctcggtccgagacttgagcacccggcggtactcgatcttctccagcgatatccctcaccagaaaaactcgcttcgctgggtgagaagaagctggcagcccagctctgcaaacttgcgcctcgtctgggtaaacgccttgcagcagacatagctcaggcactggccgaacaaaccgtcgtcgttcccggcacgaatgccgctgccgtagtactgccacgtctggcactccagctcatcacgctgcgtaagcaaaaagacgaggtggcgcttgaggtagaacagcgagttcttgctcaccctctttacccggtcctgaccagtatgcccggagtcggtgtcaggaccgcagccagactcctcaccgaggtcgcctgccgcgccttcgcctctgccgcacatctcgctgcttatgctggccttgcgccggtaactcggcgatccggctcgtcaatacgcggtgagcatccctcgcgacggggtaataaagctctcaaacgggcgttgttcctgtcggccttcgccgcgctcagggatccgctctccagggcttactacacccgcaaaatgagtcagggaaaacgacacaatcaggcgcttatcgccctggcgagacgacgctgcgacgttctgttcgccatgatgcgcgacgggactttttataccccgcaggggtcataacatgcttgacaacttaataggggcacccccctggagttcttcccgacgataaagaaattgcctttctttgccgccagggaaaagatcccacagccactgatgcatcacatattcaccgcgatccaccagatgcagcaactgcgcaggcgaaagctggccggtatgtaaggttattcttgagaggtacatggttcctccttgctgagccacggcccctgattgacggtgcgttccccaaacagccactgctgacgatttaaaggaacatcccggcggcgtaatattttgctcgcgaccaggccgtcgtgtttcccttcccaccagcattcatcctgaagtttcgggagtgagactttcagtttatggaaatgatcctgatactgttggtatgcattacataaggcatcacacgcgttgccttcgagcagtaacggcgcaagaggtaatgccagcggatgactttttcgccccagataaagcggaaaaactggatggcgtaaaccgtcctgcaactgttcgaggctgtaaggcgcatcggctgttgttgccaccgccaccatccaccaggcatcggtgtagtagtcgcgccgggagataatcgcgctcaaaagctcagggtcgctcaactcttcacgacggctgaaataacgtgctttacgcacctcttttggcatctggaccgtgtgataatcccgtgcccagcgcgggttacggctggcgcaaaccaccagtgaatagtggcgattaaacgcgtttaagcgttcggtatcatcacgccgaatccctaccccggcagccagtagccccagcaatgctgagcgcgaaggaagttcatgggtatgacgaacttcacctggagcatcgacaccccaggacgccatcggcccatgaagctgaaaaatcagatattggctcataagccgccccttacgcgcagataaagtccagcacgtccttcatgcttccctgtttgttcatcacgtcaaaacttgcgcattcggtcttctgttcgtagaccgtattcatgttttcgcgaagcgttgtaatacgctgcaccgccacatctaactgacgtgtgccattaatgggttcatagaaagccgccgccagagagcgtggttgatcggtgcctttttctgccagcgcccaggaagcataggcacggctggcaaagctattttgtttaccggttggggaaactttaagcgcggcttccgtaaaagcgcgtatggtctgattagctaacgcttcgtcaccgccgaggttttctaccagcagatctttatcaatgcagatataggtgtagaaaagtgctgaaccgaatccggtttctccgagatgcccggcaccggcatcttcagaggcctggcgcaaatcatcaacggcggtgaaaaaatcatcttcgacaatcgtttcactgacaccaaacgcatgcgcgacctggcaggcggcttcaacattaaactcaggtttattcgccagcatacgaccaaacatagcgatatctaccgctatacggtctttacgtaacaacgcgagatcttcctcttttggcgcgcgcttttcttctgccagttgatgagcaagcgcttttacggcgtcaaattctgccgggctgatatgaactaattgttcagtttcggcgttagtgagcggatcttttggttttttgtcatttttagctttcccaagataatcagcaatttttgccgcccattcgatggcttttttatcttcaatccctttctcaatcaggatagttgccgcctcacgcgcaatacgcccactgcgaataccaatatggcccgccagtgcctgttcaaaaagtgcagaagtgcgccacgcacgtttcagactttgcgaggaaacgcgcagacgcgttgctccacccagcaccacagtttttggcgcaccggtgtcatcacggttaaggttggcagcagggtaagcggttaacacatgaagctgaataaatgttgtcatgagatagtcctttattgattttgttcgttatcggcgtcgccagcctggtaatattccagcgcccagcggatacggataaattcggttggccgctgctggcggcggtgatgattgagcaggtcgtcgctctcctggcaccagcggaaaatgccatctgccagggagtcaagattgacggaaccgtttaataatctgacggcgcggcgtaactggcgcagtaattcatccggtgtttttactgctgacaggcgagtaaaacgcccctttgacattaccgccgccagttgcgcggcaaaaggctgccgttcatcaatggctttaacattggcgctaactgcggctatcagcgccagtgcggtgatacgccactcaggttcatcctgccactttatttgtctgttcttcagaaacaggcgaaatccatccgtcagacaaacatcattaaccgtcgtactacgccgcagactggcacgttcgccgcgtttctcctgcaattcctcgtgccatttgcgcagcgtggctttgtgctcctcttttacaatactcattcagcagcctcctgctttttctccctggcggctttagcactttgcttctccgccgatgttgtaaaatatttcttgcgcgcggtcatgatgcgttccaaatcaacgggctcataaggattggtgaatacacgctcgtcaaaatcctgacgcgcgaataaccaaatttccttattccatttgctgagtaattcatccgcatcctgaccttcttcaatttggcgcactaacctcaggaagcgatgctgagttttgttccagaagtcgatatccacaaaactaaaatcaccccttgcaccttttggatcggagaaccatgcttctttcaatgcactccgtaacagacttagaatccgtgaagccgtttgcgcagccagccgcagtttcggtatctggccttcttttttattgagcagcagcgggaaatgatgttcgtaccaacagcgcgctttcatgttgtcgaaatcatagccaaatccccacaggcccacttttgcctgcttgagactgctggcattaaagagtttcaccaccagcgcgggaagttccgtattgttttctgacttacccgtttcgataaggcctaaccagtcgcgccagattaaaccgcccggttgtggtttgaccgagtaaaactcgccgccctctttaagtagtacacggtaaggcgttaagggatgctgccacatggcatagttagcgccgtaatttttggtcgtcatcaggctcagaagcgcgtcgctctgctcaccgcaaatatcgcagttgccgactgtggtggtattaaaatcaatacgaatacggcgaggcattccccagtacgcctggagtttattgacctgctcatcggttaccaccgcaccggccagttcgctgatgcgcgtcgggccaagccaggggaaaaccagatcgtcaaattttttgggtagcggtaaatcggcttcatcctgcggcatgacattgatccacagtttgcgccacaagggagtttgttgattaccctgatattcctgtaattcaatcagagtggtcatcggcccaccgccgcgtaaaccggtgcggtagcctttgccacctgacggcgcattcaactgtagggagaacagagctaacgcagagcaatgtgggcacaggtattccgttacaccacgcttgataaagtggtctttattaaacttcgttgtttgagcgccgggaatctcaggcagtagcgaagcgaccggaactttatctccggtgagcgcctcgaaatcctgtataaatgaaggggaatctggcccaaactggaaagcatgttctaatgacagcaatgcttcccgtagcttttcagcttccagtccgtcttcccagatatcatcccaacgacgatgatcttttggcgcgaagctggtttgtagtagccccagcaaaaactgccataccgcaccctggagatctgcccgcggcgcagaaatatcgacaacattttcatccgccagatcgactggcgccagtttgcctgtcgttccgtctttaaaacgaacgggcaaccacggggttgtcagaagtgaaaacgagttcatacgcatcctctcgtaaaaaagaccatcccaggtcggttgtccatctttccatccttttcggtgtatcaactattcagagagtcctgtcgcagacatctcaaccaaccttgccaatcaatccttccgtagccgaatacccgcaactttcgtcatcgttgactaaaataacgtttgccatctccggatcttgtcgctgttcaatgcaccacagcctgaacgcctctccctccagtaaagaaaactcatcccgatgttttttccaccagcttcggcgcactctgacaacgctcatttcccatgcgtgagcaccggtggcataaggcttcaccacaccgtcaatacaggtagccagccacagggaaacagactcctcagccagacgtgtcgacagtttttctgggaggtaatcgttgatattggcggcatagccgggcctgaagttcagcacaaactttttagccattgcgcgatcacagtaatatttgcccacttgctcctgctcgctgcgggcaaatccttccggcattaccacgtcctcaccgtagacggattcaataagaagccgggctgcgtgtggcatctgaatagcaccttgctcacgcagcacacgctgcgtcagccagattcgcccatgatcgggatagacaaatgcactgttacgcatggcactgccaaaccattcgtcgccaggagagtcgtcccagacgggagccagaatcagcaattcagggggggaacgctcgtcctttccgtcacgctttaactgaccattaatatcgcggatatgccgctgtaatcgtcctgctcgctgaatcagcaaatcaacaggggccaggtcggagatcatttcgtccaggtcacaatcgacactctgctctaatacctgagtacaaataaggacttttccggcacgctgtgagctatcttctttaccaaagcgtgccagtgtctccgtttcaattcgctggcgatcgctaaaagcaaagcggctatgaaaaagtgaaaggctggaagcaggaatgacgccgcgggcaagcagctgacgatgaaccttaatagcgtcatcgacagaattccggatccaggcgatgcatttcccctgacttaccgccgattcgatacgcgcaatacactcttgttcactatgaagccaacccacgctgacgctacgctcaacgtctttgcgcgtcgctacccggtgtgagttcacatcggatttcgtgacatgcgtcagccaggggtaatcatccttttccaggaacggagcttcttgcaggccctctgtaccccgcgcaaaggcagcgacgagtttgtcgcgctgctgttgagataacgtggcagaaagcaaaataacgctgtttccgccacgcgcctgccgctcgatcaacccttcaagaatgcacgacatgtaagcgtcacaggcgtggatctcatcagccagcaggattttgttactcagccccagaagccgcagattattatgtttgaacggcatcaccgccatcatcgcctgatccagcgtgccgacgccaatttcagccagcaacgccttcttgttactgtcggcaaaccaggccgcacatccctgactgaacgtttgttcatccggttcttctgacccgactaaatcaccagaccagagtgattcattaaagcggtccattaatgtgcgggcactatgtgccagcaccaggctggggcgggattctggcgaatagaaagcaagccaggttttgaccagccgatcgtacatggcattggccgttgccattgttggcagaccaaaaaacagcccctgagccttccccgcagctatcaacctgtgcgccaggataagcgccgcttctgttttacctgcgccagtcacatcttccagaataaataactgcggtccttgctggctgatatccagatccagcaccttttgctgtaacggtgtcggattctcaataaaaggaaacagcgtattaattccgttgaaaggcgcgacttttgcttttagaggaaagacggttaaggcgttttgagcctgaactaaagttttctgccagtaacctttaatatccattgggtgtgcgacgcgtggaaaaaatcgcgttgacgaacccgtccagtctgcgagcacgacggttgcagagatataccaggaaaggtgttttataagttcaatgccctcatcatcatcccagaatgcggggatctctatgagcggaaacagtggtttgatttcaaggagaaaatctcgtgctgcagctttgtcttcaggcagaaaattatccaattcatccatacgatcagggggccgaccatgatgccctgtcgtcacgggcatccacatttctatcactcgcctaagtttgcgcggagagagcgaagatgaaggaagtaactcctgacattcacttaaataatgattccacaaccagtagcccagcgttgaatgagagattttttcgtaattttttctggcaccttcctgaatcttgagttcagggggcaggtaaagttgttgaaaagagcgggcaaattttccaatatcgtgccagcacagcaaccaggcgaaaaattgagccgcctgttccttgtcagaaatccctaattgacgaaaataatcagccagcccgaagcaatttcttttaaccattaaatagcccatcgcggctacatccagcgaatgccagcaaagaaggtgatagtcgtcgcccccgtctttctcgccgcgtcgggtttttccccagaaatcaaaaaaagtcacaatatttttatccttcagtaaacttaaaggatatttacgcatatattaaaaattatctgtgatatatatcattcaataaaatatttacattatgaataatcaaataattttcatccgtaatatatatgaataataaacataggcataatattcacataaataatataaattaaaaaagggtgcaggagaccaaaccatcacaattcagtacgcggggttttacccccgcgtggtggctacttcttcgattcgtaagcgagaactgccttaaactccataccacgttctctgatactcaactcacacaacgagtcgcctaccatcagcgtgaatcccagtactgtaaaacacagcactatgattgccacaagggcatattttgtcagcatgtcttgcctccctgcaaagaagagactaacattcgaattgtttgggttcgaacgctggcctcaggttgatagaaatatcgcctggggcttttgtccatctggaacctcgcgaatgcttaacgccagacagcctcaagcacccgacgccattctatacctgataattcttccagcggcgttcacgtttaaaatcaggaatactgctcgcaaaataaaaacgcccccatcatttctgacagaggcgtttaatttatccggcaatatttacccttcgtgcaatccacattccctttttaagccaaagaaacgtgtttcttcttccgacatgccaggttcccatttacgggttgtatgggtatcaccgaccgataaatatccttcatcccataatgggtgatatttcaggccatgtttttgcaggtactgataaatagttcggttatcccagtcgataatcggcagcactttaaatacgccacgctgaattgccagcaccggtaaattggcgcgactgccggattgttcacggcgcaggccagcaaaccaggtttgcgcgttaagttctttcagagcccggttcatcggttcgactttgttgatgtcattgtacttttcaatgccttcaacgccctgctcccacagttttccgtagcgtgcttcctgccaggctgcgctttcggtagcacggtacactttcaggttgagcttgagtttgtccgttaactcgtcaataaagcggtaggtttccgggaacaagtaacccgtatcggtgaggatcaccggaatatccgggcgaatttgattcaccagatgcaggctcaccgccgcctgaatgccaaagctggaagaaagtacatattcaccgggcagattatccagcgcccaggctacgcggccttcagcgtccagtttttccagttcggcgttagtttccgccagcgccagaatacgatctaccttcggcagttcgttcagggcgtttagatcgagtttggacatagattcctcactgtttgccttgcctgatgcgacgctcacgcgttcttatcaggcctacaagaccgggctgatggttaatcccacaaatcgcgcgccggatcgagcaccgggcgaatgatgcccgcacgcaccgtaaagtcgccgaagccttcacccgcttcgcgctctttcgcccagcgccctatcagttcatcaagcgacgccaggatttccggctcggtgatgttttctttatacatccgtgggatacgtgtcccaatgcggttgccgccaagatgcaggttgtagcgacccggcgctttacccaccaggcccacttccgccagcatcgcgcgaccacaaccgttcgggcagcctgttacacgcatcacgatatgctcatcgctgacaccatgtttcgccattaaattatcgatgttgtcgataaaagacggcaggaaacgctctgcttccgccatcgccagcgggcaagtcgggaatgacacgcaggccatcgagttttcacgctgcggcgtgacggcattcattaacccgctctctttggcgatcttctcgatcttcgctttctcgctttccggtacaccggtgatgatcagattctggttcgccgtaatgcggaaatcgcctttgtggatcttcgcgatctccagcaggccggttttcagcggacgccccggataatcaaggatgcgaccattttcgataaacagcgtcaggtgccagttatcatcaatgcccttaacccagccaatacgatcgcctcgtccggtgaactcatatggacggatcggttcaaatttgatccccgcgcgacgctccacttccgctttaaacgtctcaacccccacgcgctccagcgtgtatttggttttggcatttttacgatcggttcggttaccccagtcacgctgagttgtcacgacggcttcggccaccgccagcgtatgctccagcggcagatagccaaactcgctcgccgtgcgggcgtaggttttcttgttgccgtgttcgatagaaagcccaccgcccaccagcaggttgaagcctaccagcttgccgttttcggcgattgccacgaagttcatgtcgttggcatgcagatcgatatcgttctgcggcgggatcactaccgtggttttgaacttacgcggcaggtaggtctgaccaaggatcggttcttcatcagtagtggcgactttttcctggtcgagccagatctccgcatacgcgcgggtacgaggcaacagatgctcagaaatcttcttcgcccactcgtacgcttccgcgtgcagctgcgactcgtaagggttcgaggtgcagagtacgttacggttcatgtcgttagctgtcgccagcgcatcaagaccgaccgagtgcagcatctggtgcaccggtttgacgttctttttcagaatgccgtggaactgaaacgtctggcggttggtcaggcgaatgctgccatagatggtgttttcaccggcaaatttgtcgatcgcctgccactgtttagtggtaatcaccccacccggcagacgacagcgaagcagcatcgcgtggcgcggctccagcttctgttcagcacgttcggcacggatgtcgcggtcatcctgctgatacatgccgtggaagcggatcagcaggaagttgtcgcccttaaagccgccggtcagaccgtcgtttaaatcttccgcaatggtgccgcgcaggtagttgctttcaagcttcatgcgctcggcgtctgtcagttttccttcgaccactaaaggccctggatgtttttcgctcattagtagacatctcgctgataacggcgctctacgcgcagctcacttaaaaattcatccgccgcttcggtgtccatgccaccaaattcggcaatcacttccagaagtgcctgctcaacgtctttcgccatgcgattagcgtcgccgcagacataaatgtgggcaccgtcattgatccagcgccacagctccgcgccctgttcgcgcagtttgtcttgtacataaactttttctttttggtcgcgcgaccaggcaagatcgatacgcgtcagcacgccctctttgacgtagcgctgccactccacctggtagaggaaatcttccgtaaagtgcgggttgccaaagaacagccagtttttacccggcgcttcgtcggcggcgcgttgctgcataaaggcacggaacggcgcgatgccggtaccggggccaatcataatcactggcgtttgcgggttagcgggcaggcggaaattgtcgttatgttcgataaatacgcggacttcgccctcttcttccacgcgatccgcgaggaagctggaggcaccaccggcacgggcgcggccttccacgtcgtaacgcaccacaccaacggtgacgtgtacttcgttctcgacttccgcctgcgaggaggcgatggaatacaggcgcggggtcagcgggcgcagcaggttaatcagcgcttcggcatccagttgcgccggagagaaacgcaccatgtcgacaatcggcgtggtcgcggcgtaatgctgtaacttcgctttatcgcccaccagcggcagcagcgtttcgctgcgggtaagcgtggcatagttctcaacaatgttggcggtgttgacggtcagttcgaagtgccactgtagcgcttcgttcagaggcaacgttttgccctcgacggtgacaggttcatcgcctttcagccacagcagttcgacaagttctttcaccagtgccgggtcgttctgataccagacacccagcgcgtcacccggctggtaacgcaggcctgaatcgcctaagtcaatttcgatatgacgaacgtctttttcagagttacgcccggtaattttctggttaaccgaaaggctcgccaccagcggcgcgtctttgctgtacgggctggtgtggatttcatttaccgcgccagtagcgacggattgcgaaggtgccgcgacaggcgcacgcgatttaagcgcatcaaccacgcgggcgcgccactcgctggcagcagcctggtattcaacatcggcatcgacacggtcgagcaggcgttcaccacccagttccgccagcttgctgtcgaaatctttcccggactggcagaaaaattcataagagctatcgccgaggctaaacacggcaaacgcggtgttttccagctttggcgcttttttggagaacaggaacttatgcagcgcgacggcttcttccggcggttccccttccccttgcgttgacgtcactacgatgagcagtttttcgctggcgatttgtttgaatttatagtcgcccgcgttcaccagcttaacgttcagttttgctgctaataaatcatcgcgtaatgcttcagcaacccggcgcgcattgccggtttgcgaggcggagataatagttatacccggcatttctgcggctggcgctggcgtcgctgcaagcgcagcaggctgctgattgagtacgccccagaaatagccagaaacccaggcaagctgggtaggcgttaaatcggtcgtggccgcctgaaggcgtgccagttgctccgggttcaacggaagcaacgcggaaggtgggacctgtgtcgtcatgcgtcgttatgttccagtaagcaaagctgtttctgcgccctgtcagcgcccataaaacagaagagaagataaggttaacggggtgaacggtgtggattaaagacgggatagcgataactaataaccaaatcgactaacctgttttagcaatagtctttaacaacaaaatagattaaccaacccaatgaaaaacaaatgaatttagccaatcattaagataaatcagcgattttgcgcaacaaagtcgttttagataatgcgaaaaaacagcctttccggtactctacggcggttttatcgtcctgtagagaaattatgatgtccaccacgttatttaaagatttcaccttcgaagccgctcaccgcttaccacacgtcccggaagggcataaatgtggtcgcctgcacgggcattcctttatggtgcgactggaaattaccggggaagtcgatccgcatacgggctggattatcgatttcgctgaactgaaagcggcgtttaagccaacttatgagcgcctcgatcaccattatctcaatgatattccaggtctggaaaacccaaccagcgaagttttagcaaaatggatttgggatcaggttaaacccgttgtgccgctgttaagtgcggtgatggtaaaagaaacctgcaccgcagggtgtatctatcgcggcgaatgataagagtgtgtcggcggtcaatttcccttaagtaacgctatgttagggtgttgtgttctggatatctggggcatgacatggaagacgactgcgacattattattattggtgccggtattgcaggcaccgcttgcgcgttacgctgcgcgcgagcgggtttatccgttttgttactggaacgcgctgaaatccccggcagcaaaaatctttccggcgggcggttatatacccatgcactcgcggaactcctcccgcaatttcatctgaccgcgcctcttgaacgacgcatcactcacgaaagcctttccctgttaacgcccgatggcgtaacgacgttttccagcttacagcccggcggtgaatcctggagtgtattacgtgcacggttcgatccgtggctggttgccgaagccgaaaaagaaggtgtcgaatgcatccccggagcgacggtggatgcactgtatgaagaaaacggcagagtctgtggcgttatttgtggtgacgatattctccgcgcccgttatgtggtgctggcagaaggtgccaacagcgtcctggctgaacgtcacgggttagtgactcgtcctgctggcgaagcgatggcgttggggatcaaagaagtgctgtcgctggaaacatccgctattgaagaacgttttcatctggagaataacgaaggcgcagcgttgctgttcagcggcggaatctgtgatgacttacccggcggcgcatttctttatactaatcaacaaacgctctcgttagggattgtttgcccgctctcttcccttacgcaaagtcgtgttccggcaagcgagctgctgactcgctttaaagcgcatccggcagtgcgcccgcttatcaaaaacacggaatcactggagtatggtgcgcatctggagccagaaggtggcttgcacagtatgccggtgcaatacgccggtaacggctggctgctggtgggcgatgcgttgcgcagttgcgtcaataccggaatttccgtgcgcggcatggatatggcgctgactggcgcacaggcggcggcacaaacgctaataagcgcctgccagcaccgcgagccgcaaaatctgtttgcgctttatcatcacaacgtagagcgcagcctgctatgggatgttctacaacgttatcagcatgttccggcgcttttgcaacgccctggctggtatcgggcgtggcctgcgttaatgcaggatatttcccgcgatttatgggatcagggtgataaacctgttccaccgctgcgccagttattctggcgtcatttacgtcgtcatggcctgtggcatctggcgggcgatgttatcaggagtctgcgatgtctgtagcccataatctctggcgcgttgctgatgcgccgcacattgttccggctgactccgttgagcgtcagatggtacaacggttgattaacgcctgtccggcaggtcttttttcgctcacaccggaaggtgacttacgcgttgattatcacggctgcctggagtgtggcacctgccgtttgctgtgcgacgaatccacactacaacagtggcgctatccgccttccggattcggcatcacctaccgctttggataaataataaggataatttatgcccctcttacacctactccgccagaatccggtgattgctgccgttaaagataatgccagcctgcaactggctatcgattctgaatgccagtttatttccgtgttgtacggcaatatctgcaccatcagtaatatcgttaaaaagattaagaacgccgggaaatatgcttttattcatgttgatttgctggaaggcgcgtcaaataaagaagtcgttattcagtttttgaaactggtgaccgaggcggacggcattatcagtaccaaagcctcaatgttgaaagcggcaagagcggaaggttttttctgtattcatcgcctgtttattgttgattcaatttcgtttcacaacattgataagcaagttgcgcaatcgaatccggattgtattgagatcctgccaggctgtatgcccaaagtgctgggctgggtgacagagaaaatccgccaaccgctgattgccggtgggctggtgtgcgatgaagaagatgcgcgtaatgcgattaacgcgggtgtcgtggcgctttccaccacgaataccggggtctggacgttagcgaaaaaattactttgacgggataatcgtaaccaattgaatttggtttgatttgtaggccgcacgccacatccgacattcagcgcctgatgcgacgcttgacgcgtcttatcaggcctacaagtccccaggccagaaccgtaggcaggatcatccggcaacacgttattggcaatctgcgtgaatgtttgtcaccagtgcctccagcaccactttccagtcatcaaccacgccaacatctgcctgtgaaaataccgcagcgctggcgtcatgattaatcgccaccacaaacttgctattgcgtacgcccgccattaacgctgctgcgccagaagcgccaacaacaatacacacctcaggtgccagcagatgtccggaaataccaatcactttttcagcatcaacgccaccgttcatcactcgcgcccgactgtagcccacttcggctcccagcttttctgccagcatagcgatttcctggttatctgcctctccgccctgccccaccaccagcacccgtctggcctcagctaatgggtcgcgagtaacatttttcagatcctctgtgctaaccagccagtccggaagcgcacccgggacaatgttcagttgttgcattccagagggcaacgtggcgtttttcgctgctcccgcctgacgcgccagggaaaggcatagcgggcgtttttctgtttgcagcgtcgccgttagcgcatttccccagtgggatttgcgcacgcttacggttggaatatctaacgaagtcacctggcagatgcttgcaccatgtaaacgccaggccagccgggtcgacagttcatcgccaaacgttcccggcggaaagagaacaacgtccgcaggcgttcgctgccactgttccaccaacgcatccagcacctgttccgccactacaggctgaggttcaatctgccagtgcgccagggtacaaccgctgaaatcctgcgccgccagccagcttgctattgcggcattctcctgatttattgtcacaattgcgatattcatggctgcatcctttggcgtaaatagtcctgccatagcttttgagctttttctgctaccgtttgcccatcaatcagcgtcgctccgcgtcgttgctctgctcttgccagttgcagacactgcatcgctggcatttcggcagcaacagttttacggataatttctgctttccccgcagccattcgctggcgcattcccggtactggcaaggccacttcaccgcactgacgcacggcaatcaccgcaggcaagcgaacccggcaacaacgcaacccatgttcagtacgctgttcgagggtgataaacagcgcgtcgagagtgaaacgctccacctgggtgaagcagggccagcccagcatttccgccagcaaaaatggcgtttgcccattctgcccttcgctgctttggcagccggtaattatcagatccagcggattctgatgctgccattcggcaatatggcgagcgacaaattccggcgcaaagcgcagatctgccgccgtctccagcaatacagcttcctcaaacccaagagccatgagatagcgcagccagtgcaatgcccgttcatcccccatgctcaacgcggttaaagacatcggcgtaccgttttttctctgcgccaacagcagcgcggcagcggcctgttcatcagcaccgagtaaacttcgcagtagcgaaatatccggtccgcttttaccctgagccgccgcctgccactctttttccgccagcattccggcatccggttcggctttaaacgctaacagaatgttcattcgcacctcctacatttcccgccgccaccagcgggagggctttagtttctggtgcccatagccaggtcacaacaaaatcaaccaacaacactgtcgccaggagcaataaggtgacttgcattccccactgcgccagcacccacggcagcaggccagtacttaccgccgcgccaagtcgactcatggcggtggcaaaaccgacgcccagcgagcgaatgtcagtaggaaaactttccgcaggcaaaatgcccaccagattactgactgccgaaatggtggtgctgaagagaacaaaaagcagcagcgttaatgaactgccggaaggcaaacaggccatcactaccagcgttgccgccagcagcaaaaaacttcccagcaaaaatttgcgatgtgccagcaggtgcgtcagaactaatcccagcagcgcgcccacaattaacaacgcattaagcatcaggctggcagtcagcgcatcttccagaccaatagtctgggcgatagttggcagccaggtataaatcacaaaccatgggattacgaggcagacaaagaagacgctgttaaacgccgtgcgccgccagtaacgcgaagagaacaaggttttgatgtgtttatgggtcgccgttaccacttcatcgcccagtaaaacatggggaccaaaatagcgatgcacgatagcgtgagcttctgcaaaacgcccctggcgcagtagccagcgtggtgattctggcgttccccagcgtaataacgtaatcaacaacgcgggcagagctgccgatgccagtagccagcgccaggcctccgggttttcggaaataaagtgatgtccggcaatacttgccagcacatagcctacggtccacaccacgctgaatgcgcccagcaaaataccgcgatggcggcgcggggaaaattcagccagcaaggttaatgccattaggatcgaactgctttttcagcccttccagcaacgcccacgcgctgccgtgttccagtttgctccagtgaacgcgatgtttaccgataccgtggtggtgcaccatcgaaccgccgaggcgaatggtttcttcacagatgatcttgttgagcggattgtggtacttgtcgatttcctcttccggcttacagtcaacgacgttgtaatcgtagacgaagtacatgttggtgccgttctgatagctatgagaggaatgaccgcccagcatggtgatgtcgtcggcgtgcgggaactcagtacgaatacggttaataacgctttcgtagatttcgtggatgcagctccagcagccggacacttcagtggtaaagcccatgttgccggttttgaggatctgcacacgttcggcagccactttatccggtccccagttcaggttgttaaaccaggtttcgatcagcttgctgtccacgcgctggcattgcgggtagcgggcaacgatttccgcaatcccttcgcccgtcgccttcgcaatgcgagggttaccttcagccataaagatcagcacgcattttccgtctgcaaaatgggtgaagtgttgggtgccatcttcagcgtcatacaaacgagcgatcgacggacgatacccttccaccatgacttcacgcaggatgttgaagtcggttttcatgtcttccaggatatagccgtagaagaggttgttttccggggtgaatttaaagattttcactgttacttcagtgatatagcaaagtgcaccttcgttaccgatgatgatgtggcgaatgtccgggccagccgcgcggcgtggcacgtttttaatgcgtgtgacggtgccatcagccaatactgcttccagaccaacgaccatatcttcgattgcgccgtagagtgtggagaactgcccgatactgcgggttgctaccaagccgcccatctgcgccagcggctttgactgcggagaatgccccgtggtgtaacctttttcacgcaacgcattttccagcacctccagcggaacgccacattgcgccgtcgcctgcatattctcaatatcaatattaatgatttgattcatggcggagccgtcaagcaccaccgagttttccacaacggtttccagcccaccttcagtggcggaagcgccggtacgcggcacaccgttaattttgtgcgcattcataaaattcagcacacgggatacttgctctgtggaaccgagttttacgaccgctgccggaatcggcaaagtataaatgccatgaatatccggaaatttacgaaaacggtcaatactgttcttctttaatactgtttcatcggtaattacgcgatctgcaccaacaatttcctttagttggtcgacaatcgctgcgcgagataaagacatagtaattccttcctgataataaaaatggaataatcattaataagagaaaacagaaaccaccgttatggattagcgcactaaataaccaccattgaccactaataaatgcccattgacataatttgaagccggacttgcgaggaatacagctgcgcccattaaatcctgagtatcgccccaacggtttgccggaatatgatcaagaacgcgctgattggtttctggattactgcgtgtcgccagcgtaatatctgttgcataatagccaggagcaataccatttacctgaatattatattgacctagttcatcacaataagctttggtgaatccggcaagagcatgtttagtggcagaatatgcaggtgaccattgtccacctaagtaagagaacaatgaacagatattaataattttgccgcttttctgcgggatcataatttttgcagcttcatagcttaactcgaatgcggcggtcaggttcacatcaatcatcggatcccagtcggcacgaccgaagtccagcaccttattcagcttacaaataccggcattgtttaccagaatatcaactgtaccgaaacgctcacagcaagcagcgataatcttctgcggcgcgccttctgcggtgatatccacctgcatgaagtccacctcaacaccctgtttttcaatcatttcctttgtttcgccgttatctttcaatcatttcctttgtttcgccgttatctttgacgaaactaggaataaagatatttgcgccagctttggccaacgccatggcaaatgcctggcctaaaccgctattcccaccggtaacaattgcggttttacctttcagtgagaaaaaatccattgagaacgcattgagagattcgattgacatagttagctccaatttccgtaaggcaaaaaaaagaaaggtaacttcccccgcgagagggaagttacctttctcattatctctggtaactggagataatttttagcataacggcataactgctaatgtgatcgtaatcacagtgtgatattcgtattgtcaaatagttttaaaaagcagaagcgtgattactctcacacaacacctctgctttccatgttatttcttattgcaattactagagacctgagaaaagtaatccacctgaaagggcggcttacttttctcttttttttgtctattacaaatgggaatacgatatgcaacacaactcatatcgccgttggataaccctcgcgataattagttttagcggcggcgttagttttgacctggcttatttacgttatatttatcaaattcccatggcgaaatttatgggattcagcaataccgagataggtttaataatgagtacctttggtattgcggctattattctttatgcccccagcggcgttattgccgataaattttcacaccgcaaaatgattacttccgcgatgatcattaccggattactgggtctgttaatggcaacgtatccaccgctgtgggtaatgctctgtattcaggtcgcctttgcgataacgacgattttaatgctgtggtcggtgtcgattaaagccgcctcgttgctgggcgatcatagtgagcaagggaaaattatgggctggatggaagggctgcgcggcgtcggtgtaatgtcgctggcggtgtttaccatgtgggtcttttctcgctttgcaccggatgacagcgccagcctgaaaacagtcattatcatctacagtgtggtttacatcttgttggggattctgtgctggttttttgttagcgataacaacaacctgcgcagtgccaataacgaagaaaaacagtcattccagcttagcgacatccttgccgttttgcgtatcagcaccacctggtattgcagcatggtgatttttggtgtcttcacaatctacgccattctgagttactccaccaactatctgaccgaaatgtacggcatgtcgctggtggcagcgagctacatggggattgtgatcaacaaaatcttccgcgcgctgtgcggcccacttggaggcattatcaccacctacagtaaagtgaaatcccctacccgcgtgattcaaatcctttccatcatcggtttgctggcgttgacagccctgctcgtcacgaactctaacccccaatcggtcgcgatggggattggcctgattttactgctgggattcacctgttacgcctcacgcgggctgtactgggcctgccccggcgaagcgagaacaccgtcttacattatgggcaccacggtaggtatttgttcggtgattggattcctgccggatgtcttcgtttacccgattatcggccactggcaagacaccctgcccgctgcagaagcctaccgcaatatgtggctgatgggcatggcggcgctcggcatggtgattgtctttacctttttgctgttccaaaaaattcgtactgctgatagcgcccccgcaatggctagcagcaagtaagccaggaaaattacaggagaaaaatcatgtcgaaaaaatacatcatagggattgatggcggaagtcagagcacaaaagtggtgatgtacgatctggaaggtaatgtggtttgcgaaggtaaaggcttattacagccgatgcacacgcctgatgccgatactgcagaacatcctgacgacgatttatgggcatcattatgttttgcaggtcacgatttgatgagccagtttgccgggaataaagaagatattgttggcatcggcctgggctccatccgttgctgccgtgcgttattgaaagccgacggcacgccagctgcgccgttgattagctggcaggatgcacgcgttacacgcccttacgaacatacgaatcctgacgtggcgtatgtaacctctttttcgggttatctgacgcatcgcttaaccggcgaatttaaagataatatcgccaactattttggtcagtggccggtggattataagacctgggcatggagcgaagatgccgcagtcatggagaagtttaatatcccccgtcatatgctgtttgatgtgcaaatgccaggcactgttcttgggcatatcacacctcaagccgcgctggcgacgcatttcccggcaggactgccggttgtttgtaccaccagtgataaaccggtagaagctctgggagccggattactggatgatgaaactgcggtaatttctcttggcacttacatcgcattgatgatgaacggcaaagccttgccgaaagatccggtggcgtactggccgattatgtcttctattccgcaaacattgctgtatgaaggttacggtattcgcaaaggcatgtggacggtgagctggctgcgcgacatgttaggcgagtcgttaattcaggatgccagggcgcaggatctttcaccggaagatttactcaacaagaaagcctctagtgtgccacctggctgtaatgggctgatgacggtgctggactggctgaccaatccgtgggaaccgtacaaacgcgggattatgatcggctttgattccagcatggattacgcatggatatatcgttcgatattggaaagcgtggcgctgacgctgaagaacaattacgacaatatgtgtaatgaaatgaatcactttgcgaaacatgtaatcattactggcggcggttcgaacagcgatctgtttatgcagatttttgccgacgtgttcaaccttccggcacgccgtaacgccattaacggttgtgcaagcctgggggcagcgattaatacaggggtaggtctggggctatacccggattacgcaacggctgtcgataaaatggttcgcgtgaaagatatctttataccgattgagagcaatgccaaacgctacgacgcgatgaataaaggcattttcaaagacctaaccaaacatactgatgtgatcctgaaaaaatcgtatgaagtgatgcatggggaattggggaattggggaatgcggattcgatccagagctggtcgaatgcgtgaataaggtaggccgggcggaaaactgcccggcctgaacatacctgaatggttatccccgctggcgcggggaacataagttcgacaacttaaaaaatgataacaagtccggtttatccccgctgatgcagggaacataataaaaactttaactagttcggtttatccctgtttttacaaggaatatggtaatgactccaacttattgatagtgttttatgttcagataatgcccgatgactttgtcatgcagctccaccgattttgagaacgacagcgacttccgtcccagccgtgccaggtgctgcctcagattcaggttatgccgctcaattcgctgcgtatatcgcttgctgattacgtgcagctttcccttcaggcgggattcatacagcggccagccatccgtcatccatatcaccacgtcaaagggtgacagcaggctcataagacgccccagcgtcgccatagtgcgttcaccgaatacgtgcgcaacaaccgtcttccggagactgtcatacgcgtaaaacagccagcgctggcgcgatttagccccgacatagccccactgttcgtccatttccgcgcagacgatgacgtcactgcccggctgtatgcgcgaggttaccgactgcggcctgagttttttaagtgacgtaaaatcgtgttgaggccaacgcccataatgcgtgcagttgcccggcatccaacgccattcatggccatatcaatgattttctggtgcgtaccgggttgagaagcggtgtaagtgaactgcagttgccatgttttacggcagtgagagcagagatagcgctgatgtccggcagtgcttttgccgttacgcaccaccccgtcagtagctgaacaggagggacagctgatagaaacagaagccactggagcacctcaaaaacaccatcatacactaaatcagtaagttggcagcatcacctacgaatcgcactctatcaattttcacttaaagtatgaactggatatctttattcataagaactattcatcaacagcgtatagaggcggttatgtaaaaccactcgttagcctcaaaacaaagacaaatttccagatttattacttaatcaatgaataacaagcttaaaaaacaaactattaacctaaagaaaaaattaacagacattaattcaatattaaaaaaataatagattaaaatttcttaacgatttaagaatcatacaaataacactttgattaaatttaattttttgtatcgataattgtgaacctctctggcatggagaactattttgaacatgaggtgttacgtggatattttgcttattacaagtactgctaatataaaaacttgagaaagagataacgggttatatggtggtttatccccgctggcgcggggaacactctaaacataacctattattaattaatgattttttaagccagtcacaatctaccaactttacagtatcacacaaacaacacatccattatgttaaagagtacttaattcattgattaaaaaggtaaatatttaaaataactctatacaaattaaaatctaccaaactttaccgcaataattttcactccagcgaaaaattaatgccacagaatttgtagagaatgctaatgattagccctggatgggtaaaatggaggagttttcagaggcgacaaacaatataaatgagtagaagtctttacaggttccacccatttataacgcttataaatgtttaatcaggcaatatttagatatttatgtgtttgcatcgacaaacgccaattacgcgcaatgcaggtttcaatgcacaaacgtgtggcatcatccttttggctaatcggctgcagtgcaatgactcgcggtttatcatcggtcagcgttgccaatagttcatccagtgcttcaatatcgcgtacgcgccccactggatgcttgatttcgttggctcgctccagtgcctgtgacaacacgtcatagccgccgcgcatgttcagctttggcgatacggtaacccaggtattcggtgtgcagcgtacctcatgagtaccactggtttcgatctggcagctaaaaccgttcttttcgagcagatcagtcagtggtagcaaatcatgaatgcaaggctcaccacccgtaatcaccacatgccgcgcggtgtatccctggcgactaatgacagccaacaagtcttcactgctcgccgccccccacttatcactctctttggtcttcgccagaatgctgaaaagggagacttcccgatcctcaagcttttcccaggtgtgtttggtgtcgcaccaggcacagccaaccgggcatccctgtaaacgaataaaaatggcggggacgccggtaaagtaaccctcaccttgcagggtctggaacatctcgttaatcgggtactgcatagcattctctgtgaagtggataattgttaattattgcagatcctgccacaacaatcatgtcttattaacattctgttacaggcagatttaaagaaaaatgcgaaacatatcgttaataattaaagggagtaacgtattatgtcagaagaaaataaagaaaatggatttaatcatgtcaaaacattcaccaaaattatatttattttttctgtattagtttttaatgataacgaatctgaggtagcctgagtttaacggacactccttcctgaaatagaatggcatcagaaggagctaataatgagcagaaaaacccaacgttactctaaagagttcaaagccgaagctgtcagaacggttcttgaaaatcaactttcgatcagtgaaggcgcttcccgattatctcttcctgaaggcactttaggacaatgggttaccgccgccagaaaagggctcggtactcctggttcccgcacggtggctgaactggaatctgaaattctgcaactgcgtaaggcgttaaatgaagctcgccttgagcgagatatattaaaaaaagcaacagcgtattttgcacaggagtcgctgaaaaatacgcgttaatcgaacaatggcgacaacaatttcccattgaagcgatgtgtcaggtatttggtgtatccaggagcggttattacaactgggtacagcatgaaccctcagacagaaaacaaagtgatgagcggctaaaactggagattaaggtggcacatatccgcactcgcgaaacatatggaacccggcggctccagacggagctggcagagaatggcatcatcgttggtcgtgaccgactggcacgtcttcgtaaggagctaaggctacgctgtaagcagaaacgcaagttcagagcgactacgaactcgaaccacaatctgccagttgcgccaaatctgctgaaccagacgttcgctcctacagcaccaaatcaggtctgggtggcggacctgacgtatgttgccacacaggagggatggttgtacctcgctggcatcaaagatgtttatacgtgcgaaattgtcggctacgccatgggagagcgcatgacaaaagagctgacaggtaaagccctgtttatggcgctcaggagccagcgcccacctgccgggctaatccaccactctgatcgaggttcacagtactgcgcatacgattaccgggtcatacaggagcagtttggtctgaaaacatcaatgtcgcgtaaaggtaactgttacgacaacgctccgatggaaagcttctggggaacgctgaaaaatgagagcctgagccactatcgttttaataaccgggatgaagccatctcagtaatacgggaatacattgagattttctacaatcgtcagcgtcgtcactctcgtctggggaatatctccccggcagccttcagggaaaaatatcatcagatggctgcttaaaaaaagaacaaatggtagtgtccgctattgccagtacacctcatacctcaatctaaaattaccgatgccgccgtcaatttatttatccagatttaatgagaaatttataatgcgctatttcatactaatgttcactttcgtgtgttcctttgttgcagcccaaccaactattgtcccacaattacagcaacaagttacggatcttacgagtagcttaaactcacaagaaaagaaagaactgacgcacaagttagaatctattttcaataatacccaagtgcaaattgctgtattaattgttcccacaaccaaagacgagacaattgaacaatatgctacaagagtttttgacaattggcgtttaggagatgccaaacgtaatgatgggatactgatcattgttgcctggtcagatcgtactgtccgcatccaggtaggttatgggctggaagaaaaggtaaccgatgctctggctggagatatcatccgtagcaacatgatacccgcatttaaacaacaaaaattagctcagggattagagctagctataaacgctttgaataaccaactcacttcacaacaccaatatccgactaatccttcagaaagtgaatcagcgtcttccagtgatcattattactttgctattttttgggtatttgcagtgatgttcttccctttctggttttttcatcaaggcagtaatttttgtcgcgcatgtaaaagtggagtctgtatttcagcaatctatcttttagatttattcctgttctccgataaaattttttccattgctgtattttccttcttttttactttcaccatatttatggtctttacctgtttatgtgtacggtaatgactccaacttattgatagtgttttatgttcagataatgcccgatgactttgtcatgcagctccaccgattttgagaacgacagcgacttccgtcccagccgtgccaggtgctgcctcagattcaggttatgccgctcaattcgctgcgtatatcgcttgctgattacgtgcagctttcccttcaggcgggattcatacagcggccagccatccgtcatccatatcaccacgtcaaagggtgacagcaggctcataagacgccccagcgtcgccatagtgcgttcaccgaatacgtgcgcaacaaccgtcttccggagactgtcatacgcgtaaaacagccagcgctggcgcgatttagccccgacatagccccactgttcgtccatttccgcgcagacgatgacgtcactgcccggctgtatgcgcgaggttaccgactgcggcctgagttttttaagtgacgtaaaatcgtgttgaggccaacgcccataatgcgtgcagttgcccggcatccaacgccattcatggccatatcaatgattttctggtgcgtaccgggttgagaagcggtgtaagtgaactgcagttgccatgttttacggcagtgagagcagagatagcgctgatgtccggcagtgcttttgccgttacgcaccaccccgtcagtagctgaacaggagggacagctgatagaaacagaagccactggagcacctcaaaaacaccatcatacactaaatcagtaagttggcagcatcacctatgtgtacttcagaaaagagcatcaggtaaaagttatcattcagacaacagcggttccggtggaggctcaagtggcggcggatttagcggcgggggcggttcttctggaggtggcggcgcatccggccgctggtaactcaaccataaaaaatgccagcccggaggctgtaatgccgatcagttaaggatcagttgaccgatccagtggctgtgtaagaatccggaaacgctcacttgtttccggatttttttatgcacattggacaggctcttgatctggtatcccgttacgattctctgcgtaacccactgacttctctgggggattacctcgaccccgaactcatctctcgttgccttgccgaatcaggtactgtaacgctacgcaagcgccgtcttcccctcgaaatgatggtctggtgtattgttggcatggcgcttgagcgtaaagaacctcttcaccagattgtgaatcgcctggacatcatgctgccgggcaatcgccccttcgttgcccccagtgccgttattcaggcccgccagcgcctgggaagtgaggctgtccgccgcgtgttcacgaaaacagcgcagctctggcataacgccacgccgcatccgcactggtgcggcctgaccctgctggccatcgatggtgtgttctggcgcacaccggatacaccagagaacgatgcagccttcccccgccagacacatgccgggaacccggcgctctacccgcaggtcaaaatggtctgccagatggaactgaccagccatctgctgacggctgcagccttcggcacgatgaagaacagcgaaaatgagcttgctgagcaacttatagaacaaaccggcgataacactctgacgttaatggataaaggttattactcactgggactgttaaatgcctggagcctggcgggagaacaccgccactggatgatacctctcagaaagggagcgcaatatgaagagctcagaaaactgggtaaaggcgatcatctggtgaagctgaaaaccagcccgcaggcacgaaaaaagtggccgggactgggaaatgaagtgacagcccgcctgctgaccgtgacgcgcaaaggaaaagtctgccatctgctgacgtcgatgacggacgccatgcgcttccccggaggagaaatggcggatctgtacagtcatcgctgggaaatcgaactgggatacagggagataaaacagacgatgcaactgagcaggctgacgctgagaagtaaaaagccggagcttgtggagcaagagctgtggggtgtcttactggcttataatctggtgagatatcagatgattaaaatggcggaacatctgaaaggttactggccgaatcaactgagtttctcagaatcatgcggaatggtgatgagaatgctgatgacattgcagggcgcttcaccgggacgtataccggagctgatgcgcgatcttgcaagtatgggacaacttgtgaaattaccgacgagaagggaaagggccttcccgagagtggtaaaggagaggccctggaaataccccacagccccgaaaaagagccagtcagttgcttaactgactggcattacagcccggaggctggcatttttaaatcagataaagtcagtcttatgcctggcctttgatctctttacgaccgttgtacggtgctttttcgcccagagcttcttcgatacgaatcagctggttgtatttagcaacacggtcagaacggctcatagaaccagttttgatctggcctgcagcagtaccaacagccaggtcagcgatggtagcgtcttcagtttcgccagaacggtgagagataactgcagtgtagccagcatctttcgccatcttgattgcagccagagtttcggtcagagaaccgatctggttgaatttgatcaggatggagttagcgatacctttttcgataccttctttcaggatcttggtgttggttacgaacaggtcgtcaccaaccagctggattttgtcgcccagaactttggtctggtatgcgaaaccgtcccagtcagattcgtccagaccgtcttcgatagatacgatcggatactgtttggtcagttcttccaggaagtgagtgaattcttcagaggtgaaagctttgttgccttcgccagccagaacgtatttaccgtctttgtagaattcagaagctgcgcagtccatcgccagagtgatgtctttgcccagttcataaccagcagctttaacagcttcagcgataacagccagagcttcagcgttggaacccaggttcggcgcatagccaccttcgtcaccaactgcagtgttcatgcctttcgctttcagaacttttgccaggtgatggaaaacttcagaacccatgcggatggcttctttcacagttttcgcgccaaccggctgaatcatgaattcctggatatcaacgttgttgtcagcgtgctcaccaccgttgatgatgttcatcatcggaaccggcatggagtatttgcccggagtgccgttcagttcagcgatgtgctcgtacagcggcatccctttagcggcagcagcagctttggcgttagccagagatacagccaggattgcgttcgcgccgaatttggatttgttttcggtgccgtccaggtcgatcatgatcttgtcaatgccagcctgatctttagcgtctttgccaatcagtgcctgagcgatcgggccgtttaccgcagcaacagctttggttacgcctttacccaggaaacgggatttgtcgccatcgcgcagttccagagcttcacgggaaccagtagaagcacctgacggagcagctgccataccgacgaaaccaccctccagatgtacttcggcttcaacagtcgggttaccacgggagtcgatgatttcacgaccgatgatttttacgattttggacattaggttttcctcaagtcactagttaaactgaaactccagacaaacaacgcgtacccaaggtacgcgttgccgttctaacttttttacttacttcgcctgacgtttctggaactcgctggcagctttcacaaagcctgcaaacagcgggtgaccatcacgtggagtagaagtaaactccggatggaactggcaagccacgaaccacgggtgattcggaacttcgatgatctcgaccaactgatcatccccggaacggcccgcaacgcgcagacctgcatcttcaatctgtttcaacagcatgttgttgacttcgtaacggtgacgatgacgctcaacaattgtcggcgcattgtacagctggcgaaccaggctatcgtcaaccaactggcactgctgtgcgccgagacgcatggtaccgccgagatcgctcttctcgctacgaacttcaacgttgccgttttcatcgcgccactcggtaatcagcgccacaaccgggtacttacagtctggcacaaattccgtagagttggcgttctccatgttggcaacatggcgagcgtaatcaattaacgccacctgcatacccaggcaaatgcccagataaggaatattgttctcacgcgcaaaacgcgcggtcgtaatcatgccttctacgccacgatagccgaaaccgccaggtacgaggattgcgtccagacctttaaggatttcaacgccgcgcgtttcaacatcttgtgaatcgatcagtttgatgttgacgctgacacgattcttcagcccaccgtgtttcagtgcttcgatcactgatttataagcatccggcagttcaatgtacttgccgaccataccgatggtgacttcacttaccggattcgcttcttcgaagataacctgttcccattcggacagatttgcttccgggcagtttaagctgaatcgtttacaaatataatcgtccagcccctgagatttcaacaggcccggaattttatagatggaatcgacgtctttcagagaaataaccgctttttccggaacattacagaacaatgcaatcttcgcacgttcgttcgccggaacagcgcgatctgaacgacaaatcaggatgtcaggctggataccgatggagagcagctcttttacagagtgctgagtcggtttggttttgacttcaccagacgctgccatgtacggcaccagcgtcaggtgcataaacagagtgtgctcacggccaatttcaacagccatctggcgaatcgcttcgaggaacggcaaggattcgatatcacctactgtaccgccgatttctaccagtactacgtcatgaccttcgccaccttccagcacgcgctctttgattgcgttagtgatgtgcggaataacctgcacggttgcgccgaggtagtcaccgcggcgttctttacgcagaacgtcagagtagatacgacccgtggtgaagttgttgcggcggctcattttggtacgaatgaaacgctcgtagtgccccaggtccaggtcggtttcagcgccgtcttcagtaacgaacacttccccgtgttggattgggctcatagtacctggatcgacgttgatgtacggatccagtttcatgatggtcacattgaggccacgggcttcaagaatggctgcgagggaggctgcggcaatgcctttacccagagaggatacgaccccgccggtcacaaaaatatagttcgttgtcatgctgaacctgagaagttaggttgaaaagacgatggaataaccaggacgggaaagcagtatacccgaacatgacctgtgccacaaactttcattatccctcctcttcgccagcgcactattgaaatcaggagtgagaaaatagcccctttggggtaaatgtttttgacgcaaatcaagcgcttgtcatttaaaaaatgacacaaatggcgcttgaccgcgtaattcccttagagatcaatttcctgccgttttacctgttgccagacttcttccattgtttcgaggtcaacacctgtcatttccagtccacgcgcggcaacaatacgctccacttcgcgaaaacgacgctcgaatttttcgttcgctttttgcaatgcgatttctgctttcgtccctaaatggcgagccagattaaccgtggcaaacagcaggtcccccatttcctcctccagtttagcctggtcgacaacagcctgccgcgcctcgtacatcacctcgtcgatctcttcgtagactttatcaaccaccgggccaagcgtcgtccagtcgaagccaacgttggcgcaacgtttctggattttttgcgcccgcattaaagccggtaaactacgaggaatatcgtccagcgccgaatgctgcgctttctgcgcgcgctcttcggttttgatttgctcccaacgggcaagcacttcactactgttttcggcagaactatcagcaaaaacatgcggatggcgacgctctaatttatcgctaatagcagcgcaaatatcattaaagtcaaagcgcccttcttcctgagccatttgcgcgtaaaacaccacctggaatagcagatcgcccagttcaccgcgaagatcgtcaaaatcttcacgggcgatggcgtccagcacttcgtaggtttcttcaagggtgtaaggcgcaatggtggcaaatgtctgctctttatcccacgggcagccgttttccggatcgcgcaggcgctgcataatagtgagcaaacggtcgatttgattcattgaattgtcctgaaaattgcgggtctgtcaggtggaaacctgtgaccagaatagaagtgagttagtaacactacccaatcagtacgttaattttggctttaatgagttgtaattcctctggggcaactgttcctttcttcgttgctcctcttgcccgccaggcgatactttttacctgatcagctaacgctacgccatcacgttcctgaccggataaaacaacttcgaacggatatccttttgattgcgttgtacaaggaacacacagacacatacctgttttgttgttgtacatgaaaggactcaggacaacagctggacgatgtccagcttgctcgctaccttttgtcgggtcaaaatcaacccaaatcagatcgcccatatcgggtacgtatcggcttaccattaccagacttccttatctttcggctctccccagtcgatattctcgtggaggttttccggcgtgatgtcgttgaccagttcagcaagcgtaaatacgggctctttacgcactggctcaataattaatttgccatccaccaggtcaatcttcacttcatcatcaatattcagattgagcgcctgcattaacgtagccgggatccgcaccgccggtgaatttccccaacgctttacgctactgtggatcataaccctttcctcaaaccgctatcatatgtagatacagtatatatcaatctacattgtagatacgagcaaatttctgcctaactcccgtgcaaccgacgcgcgtcgataacatccggcacctggttgagtttacccagcacgcggcccagcacctgcaggttgtaaatctcaatggtcatgtcgatggttgccagttgctgttttgtgtcgctacggctggcaacgccaagcacgttcaccttctcgttggcgagaatggtcgtgatatcacgtaacaacccactacgatcattagccaccacgcggaccaccagcgaatatccggcggagtagctctcaccccataccgcgtcaacaatgcgttctggcgcatgagagcgcagttccgccagttgttcgcaatcggcgcggtgtactgaaataccgcgcccctgggtaatgaagccgacaatctcatctccaggaatcggctggcagcagcgcgcgatgtggtgcatcaggttgccaacaccttcgactaccacgcgaccgttatctttactgcggttttgcggcgtgtagcttttttgctgaagttgcttcagcgcggcggcgtcctgctcttcggcactcggcttattaaattgcgattgcaggaagttcaccatctgattgagacggatatccccgccaccaatcgccgccagcaactcgtcgacatcattaaagttgtaacgcggcagcagatgtttttctgcttctttcaggctgatccccagatgttccagctcgtcgtcaaggatttgccgcccagccagaatgtttttgtcacggtcctgtttacggaaccaagcgtgaattttcgaacgcccacggctggttgtgacgtaaccgaggtttgggtttaaccagtcacggctggggttcggctgtttctgggtgataatttcaatctggtcgcccatctgcagctggtaggtgaacggcacaatgcgcccgccaatttttgccccgatgcagcggtgtccgacatcactgtggatgtggtaagcgaagtccagcggcgttgatcccgcaggcaaatcaacgacatcacctttcggcgtaaagacatacacccggtcgtcaaagacctggctgcgtacttcgtcgagcatttcgccggaatcagccatctcttcctgccacgcaatcagtttacgcagccaggcaatccggtcttcatgtcccgaacgtgcgccgccagctgccgcgccctctttatatttccagtgcgcagcaacacccaactctgcatcttcatgcatctgtttggtgcggatttggatctcaacggttttgccacctggccccagaaccacggtatgaatagactgataaccgtttggtttcgggttagcgacataatcgtcaaactcatccggcaggtggcgatagtgagtgtgcactatccccagtgcggcatagcaatcctgtaaacgctcggcgacaatacgtaccgcacgcacatcaaacagctcatcaaaggcgaggttctttttctgcattttacgccagatgctgtagatgtgtttcggacgaccatacacttccgctttaacgccttcagctttcatctcagcgcgcagatgaccaacgaactcttcgatgtagtgttcgcggtcgagacgccgttcatgcagcagtttggcaattcgtttgtattcggttggatggaggtaacggaagcagtaatcttccagttcccatttcagttgtccgattccgagacggttagccagcggtgcgtagatgttggtacactcttttgccgccagtacacgttcatcttccggcgcatcttttacttcgcgcagatgagcaatacgctccgccagtttgatgactacgcagcgaaaatcatcgaccatcgccaataacatccggcgaacgttatcgacctgttcggaggaaacagaatcagtgtgcgtcgctttcagctggcggatcgccgccatatcacgcacgccgtgaataaggttaacaaccgacttaccgacgctctcacgcagcacatcttcgctgactacgttggcatcagccagagggaacagcagcgccgcccgcagcgtgtcaatgtccatacttaatgtcgagaggatctccaccatctcaacaccacgccacaataacagactggcatccggatgcccctgcgtctgttgcagacaatacgcccaagtttcggctaagcactcacacgacttctggctggtaatacccagacttgcgatccatttttccggatcaaattcaccagccttattgatatgtgcacttcttaccgcaaccatcgtcctctcctttagggaccagacctgccgaaatcggcaaatcgcaactatttaacgcgcgagaaaagtaccatcgattccagatgtcccgtgtgtgggaacatatccagcatcgccagtcgcgcaatggtatatcctgcttttaataacgcttcgctatcccgagccagcgttgcagggttacaggatacataaactatacgaataggttccagttttataatttgctgcataacacctgcggcacctgctcgcgccgggtccagcaacactttatcgaagccgtttttcgcccacggctgctttgtgacatcttcttcaagattttcgtgataaaacgtcacattctgtaagccattaagacgcgcattctgctggcctttttccaccagcgccggaacgccttctacacccaccacactggcagcttgtgtcgccaatggcagtgtaaagttgcccataccgcagaacaaatccagtacgcgatcttcaggttgcacatccagccattccaacgcacgcgctaccattttttggttcacacccgcattgacctgaataaaatcgcgcgggctaaaagttaagcgcaacccatttgagtcataccagggcatctcaccagagacggtttcgagtatctcactatcgggggcgagatacagatccaggccttcagaatgcgaaaagcgttccagtttttcgcgatctgccgaacttagcggtgcggtatggcgcaaaatcatcagcgtgccgctggttgcctgtaccagttcaacatgaccaagatggcgcataacttgtaagctgcccaggcatgccatgactttgggcagcaatgcttcaagttggggcactaaaatggggcattgtttaacgtcgacaatgtcactggagcccgctttgcgaaaccccatctgaagttgctgtgttttcggtaagtagttcagacttaaacgcgcgcgacggcgatagccccagggaacatcggcgatcacttcagagacttcgtgtttcattaatcgggcgagtgccgcacttttgcttcgctgctgtaaatccacgctggcgtgttgttgctgacagccgccgcatacgccaaaatgaggacagcgtggcgtttcgcgtcccgggctatcgcttaaccggcgtacgactttagcgcgggcatactgttttttatcttcagtaacagtaacttccgcgttttcctgcggcaataatccggggataaatagcgttttgccgttatgtcgcgccacgccctgaccaaaagagtcgaggtcgttgactgaaacggttatgatctgacgcgtcgtcgtgcgtcgttttgcagagtagaattgcgccattggcgagactttctcaatttaacagtgtgaccttaattgtcccataacggaactccatgaccaactacagcctgcgcgcacgcatgatgattctgatcctggcaccgaccgtccttattggtttattgctgagtatctttttcgttgtgcatcgctataacgacttgcagcgtcaactggaagatgccggagccagcattattgagccgcttgcagtttctactgaatatggcatgagcctgcaaaatcgcgaatctatcggtcagttaataagcgtactgcatcgtcgccattccgatattgttcgcgcgatttcggtttatgatgaaaataaccgactctttgtcacctccaattttcatcttgatccctcatcaatgcagctcggcagcaacgtgccgtttcctcgccagctcactgtcactcgtgacggcgatattatgatcctccgcacgccgattatttctgagagttactcccccgacgaatcgcccagtagcgatgccaaaaatagtcaaaatatgttgggatatattgcgctggagctggatcttaaatcggttcgcttgcagcaatataaagagatctttatttccagcgtgatgatgctgttttgtatcggtattgcgcttatttttggctggcgcttaatgcgcgatgtaaccggtccgattcgcaacatggtgaataccgtcgaccgcatccgtcgcgggcaactcgacagccgggtggaaggatttatgctcggcgagctggatatgctgaaaaacggtatcaactcgatggcaatgtcgctggctgcttatcacgaagagatgcagcacaatatcgaccaggcgacgtccgatctgcgtgaaacgctggagcagatggaaattcagaacgttgagttagatctggcgaaaaagcgcgcccaggaagcggcgcgtattaaatccgagtttctggcaaatatgtcacacgagctgcgtacaccactgaatggtgttattggctttacccgcctgacgctgaaaacagaattaacaccaacgcagcgcgatcacctgaatacgattgaacgttcggcaaataatttgctggcaattattaatgatgttctcgacttctcgaaactggaagcaggtaagctgattctggaaagtattccattcccactacgcagcacgctggatgaagtcgttactctgctggcacattcttctcacgataaagggttggaactgacgctcaatattaaaagcgacgtgcctgataacgtgatcggcgacccactgcgattacagcaaatcatcactaacctggtggggaatgcaattaaattcaccgagaatggcaacattgatattctggtagaaaaacgtgcgctgagtaataccaaagtgcagattgaagtgcagattcgggataccggcattggtattcctgaacgcgatcaatcgcgcttattccaggccttccgacaggctgatgccagtatttcccgccgtcatggtggcaccggtctggggctggtgattacacaaaaactggttaatgaaatgggcggcgatatttcgttccatagccagccgaatcgcggttcaactttctggttccacattaatctcgatctgaacccgaacattattatcgaagggccatccacccagtgcctcgccggtaagcgcctggcctatgtcgaaccaaactccgcagcagcgcaatgcacgctggatattttaagtgaaacgccgctggaagtggtttatagcccaacgttctccgcgctgcctcccgcgcattacgacatgatgttgttaggcatcgcggtgaccttccgcgagccgctaacaatgcaacatgagcgattagcgaaagcggtatcgatgaccgatttcctgatgctggcacttccttgccatgcacaagtcaatgcagaaaaactcaagcaagatggtatcggcgcgtgtctgctgaaaccattaacacctacgcgcctgttgcctgccctgacggaattttgtcatcacaaacaaaacacgcttttgcctgtaaccgatgaaagcaagctggcaatgacagtcatggcagttgatgacaaccccgctaacctgaaacttatcggcgcattgctggaagatatggtgcaacatgtggaactttgcgatagcgggcatcaggcggttgaacgggcgaaacagatgccgttcgatttgatcttaatggatattcaaatgcctgacatggatggcattcgggcctgcgagctcatccaccagctcccccatcagcaacaaacgccggttatcgcggtaacggcgcatgcaatggccgggcaaaaagagaagctgcttggcgcagggatgagcgattatctggcgaaaccgattgaagaagagcgattgcataatttgttgttgcgctacaagcctggcagcggtatttcctctcgcgtcgtgacgcccgaagtcaacgaaattgtggtgaacccgaatgcgaccctcgactggcaactggcactacgccaggcagcaggaaaaaccgatctagcgcgcgatatgctgcaaatgttactcgatttcctgcctgaagttcgcaacaaagttgaggagcagctggttggagaaaacccggaaggcctggttgatttgattcataaactgcatggcagttgcggctatagcggtgtgccgcgtatgaagaatctctgccaactgatcgaacaacagctacgtagcggtactaaagaagaagatttggagccggagctgctggaactgttggacgagatggataatgtcgcgcgcgaagccagcaaaattctcgggtaacggacgtcttgtcgagtagcaatcggctttttatgacgctggtttcagattggtgacaaagtgcctgtgtttatgccggatgcggcgttaacgccttatccggcctacaaaaccaattaaattcaatgaattaaaaaatgatgtagacctgatacatagcacaacaggctattttgcgtttagcatcagtctcaagccggctccagatagagccggttttggttttctgtcttaacgcaccatgcacgggcgcttgttatcgaacgtccagccaggaatcagatactgcattcccatcgcatcgtcacgcgcgccaagcccgtgtttctgatacagctcatgggctttcatcacttgatccatatcgatttctacacccagccccggtttttccggcacctgaaccagaccgcctttgatctcaaacggttctttggtcaagcgctgattgccttcctgccaaatccagtgcgtatcaatcgcggtgattttacccggtgcagcggcggcaacatgggtaaacatcgccagggaaatatcgaagtggttgtttgagtgtgaaccccaggtcaggccaaattcatggcacatttgcgccacacgtaccgaaccttgcatagtccagaaatgcggatccgccagcgggatatcaacggattgtaacgagagcgtatggcccatctgccgccagtcggtggcgatcatattggttgcagtcggcaggccagtcgcgcgacggaactctgccatcacttcacgcccggagaaaccttgctccgcaccatacggatcttctgcataagccagcgaacctttcaggtatttaccaattttaattgcttcgttcagcgaccaggcaccgttaggatcgagcgtaatacgcgcctgcgggaagcgttgcgccagtgccacaatagactcggcttcttcttccccggccagtacaccgcctttcagtttgaaatcgttgaagccatatttttcatacgccgcttccgctaggcgcaccaccgcatccggcgtcatcgcttcttcatgacgcaggcgataccagtcgcatgagtcatccggctggctttgatacggcagaggtgtggctttgcgattaccgacgaagaacagataaccgagcatttcgacttcgctacgctgttgaccatcgcccagcagcgatgccacgtttacccccagatgctgccccagcagatccagcattgccgcttctatcccggtaactacatgaatagtggtacgcaaatcaaatgtctgcaaaccgcgcccaccagcatcacgatcggcaaaagtattacgcaccagcgtcagaacgtttttgtattcacccagcgttttacctaccaccagcggaatcgcatcttccagcgttttacggattttctcgccgccgggaatttcccctacgccagtgtgaccggaattatctttgataatcacaatattacgcgtaaagaacggtgcgtgtgccccactcagattcatcagcatactgtcatgacccgccaccgggatgacctgcatttcagtaacaacagacgtcgtaaattgagaactcatatttatgtcctttttcagaatcaatgacggccgaaaacgggacgtttacggtcaaaggtccagccggggatcaggtactgcatcggacctgcgtcgttacgcgcaccgccaggcagacgtttataggcctcatgtgccttttgtacctgttcccagtccagttccacgcccagaccgggcgcatcaggaacggcaatttttccgtttttaatctccagcggatttttggtcaggcgacaatcgccctcctgccaaatccagtgggtatcgatagcggtaggattacccggtgccgccgcgcccacatgggtaaacatcgccagagagatatcgaaatggttattagaatggcagccccaggtcagcccccagtcgtcgcaaagctgcgccacacggactgcaccggaaagcgtccagaagtgcggatcggcaagtggaatatctaccgcattgagcatcaccgcatgacccatttcgcgccagttggtggcgatcatgttagtcgcgacgggcaagccggtcgcccgccgaaactccgccataacttcacgaccggagaaaccctgttctgcgccgcatggatcttcggcataggtaagaacatcattcagccctttgcatagagaaatggcttcatcaagtagccaggcaccgttgggatcaacggtaatccgcgcatcagggaagcgtttcttcaatgcacgaacagtgtcgatttcttgctcgccaggtaacaccccgcccttaagtttgaaatctttaaagccatagcgatcctgtgaggcttccgccagacgcacaacggcttcgctgttcatcgctttctgatggcgcaactgataccactcatggttgcccggcgtattttccagataaggaagatcggttttggtccgatcaccgatataaaacagataaccgaggacggtaatagtctcgcgttgcttgcctggccccaacagttcgcagaccggaacattcagcgccttacctagcaggtcaagcaaggcggcttccagcgccgccacggcattaacgcgcaattcaaaagtccaggcacctttgccgaaggtatcaaaatcggctgcctgattacctttatgcacctgctgaaccactttattcaggcgcgcaacttcctggcccagaaccatcggaatagcatcgaccagtgtttgataaatcacctctccgcccggcgcttcaccaatgccggtatgcccggcgttatcggtgagtaccacaatattgcgggtgaaatatgcgttatgtgccccaccaatattaagcaacatgctatcgtgcccggcgaccggaatgactttcatatcagtaataacaggactggattgtgtcgtcatcttattgccccgcgacaggtttcagctcgatacgcttgatatcgcccaccagcaccaggtagctcagtaccgcgattaaggcatgaacaccaacataaatcagcgccccattaaaggagccagtcgtgccaacgatataaccaattgcgattggcgtgacgatgccagaaatgttaccgaacatgttgaacaggccaccggaaagaccgctgatctcttttggcgcggtatctgccattactgcccaacccagcgccccgatgcccttaccgaagaaggccagcgccataaagccgatgatcatccactcaacgttgacgtagttgcagaacaccatcaccatcgacagcaacatgcccattacgatcggtgttttacgcgcaatgttcagcgatcccgtgcgacgcatcagccagtcggaaataatcccacccagcacaccgccgataaaaccgcaaaccgccggaacggaagccacaaagcccgctttcagaatcgacatcccacgcgcctgcaccagataaaccggaaaccaggtaatgaaaaagtaagtcagggcgttgatacagtactgaccgatataaacgccgatcatcatccgtgacccgagcagttgtttgatctgcccccacttcacgctgaacggcactttaactttggtgttttgctgatccatattgatcagcgcgccacccgcggcgatgtactccagctctttctgatttacccccggatgttgatttggctcgtggatgactttcaaccagataaagctgatgacaatccccagaccgcccataaagaagaagacgtgtgaccagcccacttcatgcgtcagccagcccataatcggcgcgaagatcaccgttgcgaagtattgagcggagttaaaaatcgacaccgccgttcccctttcctgcgccggaaaccaggccgcaacaatgcgactgttgccggggaaagatggcgcttcagcaagcccgaccaggaagcgcagagtaaacagggcaacgataatgccgaatccactaaagatatcgacgaagccttgcagcaaggtaaacatcgaccagataaagatcgaccagaagtagacgcgttttgaaccaaaacgatccagcaaccaaccaccagggatctgcccgataacataagcccatgagaaggcagagaacacatagcccattcccacgggatcaaggccgatatctttggccatttccgaaccggcaatagaaagcgtagcgcggtcgccgtagttgaaggatgtgacgataaacaacatcaccactatccagtaacgagcattcgtgcgtttttccacactgctcgcagcctgacttaaagaactcattgttgcactcctgaaaattcgcgttagccacgctcactctggactgcgacatagccaggaaatcagaggtgacgtagggtgttttttgccgtttttataggtcgttcgccgaatacggcgcgtgtttatatctggcaatagcagtataaaaagcgcgccatagcggctcaccgtgcaacaacacaacattaatgcgttcaatgaggcccgattttggcattagccctggacggtggaatccacttcacggaaatgaaaacaagaacaagaaaggaagggttaaaacgaagaaataaagaagagtatgaaatggatcgcttgactccaggcaaacgccagtaaaaatccgcgctatgaagcagtttttactggcatttgcctgaaaagattcgattcagcaccgctaaaacgacatttaccgctcgctgaacatatcaggacaacagcgtgccccactgttcgacccacggatttgattccgtttccggttccgggttctcactggcgtcaatcaacagcatttcgccaacccgctgagcgctctgttcctgcaacaaggcatcgaactgtttgccgccattgcagaaatttacataactgctgtcgccgagcgcaatcacgccataacgcagattcggctggaagcccagactatctttgattccctgaaagagcggcacaatgctatcaggaaggtcgccctgcccggtcgtggacgtaaccaccagaacatacttatcctgataaggcagccagtcgcttaattcaggatcttcaaataccgttgctttgtggccctgtgcggtcagaattgcttctgcttcttccgccactaacagcgaatttccgtacatggtgccgacaaaaataccaatttccgccataccgttttctccctggattaggaacttatctctccatcctgacccgatggcgcactgaactcaaccctttcattttcaggaagcagaccgcgccagccaaattgtgataacgcctgcatccaggtgtcgtccaggcccgcgtgaatagtcagcggctcgccagtaaaaggatgcgtcaatgacaactgactggcatgtagcattaaccgctggaggccaaaatgctcagcaccgctgcgattctggcgtaaatcgccatgtttgctatcgccaataatcggatgacgcaaatgggcaagatgtcggcgaagctgatgtttgcgtccggttttcggctccagttccaccaggccgtagcgcgtggtcgggtaacgtccggtcgctaccggcatttctacggtcgccagaccgcgataatgcgtcactgctggctgcgggcctttatcttcgcgggcaaatttatcagcgattttgtccagttcttccaccagtggataatccagcaccgcttcttccatcaaccagccgcgcacaatcgcatggtaacgtttctggatttggtgctgttcaaactgttgtgccagcagccgtccggcctcgctggataatcccatcaacaacacaccagaagtgggtcggtccagacgatgagcagtaaaaacatgctgtcctatctggtcacgcacggtttgcatgaccactactttctcgtcgcgatccagccagctacggtgaaccagccagccggagggtttatttaccgcaaccagccattcatcctgatagagtatttccagcattagctcgcatcatccgcaaaaagagcatccagtttttccaactcagccagaataagcgcgcgttgcggatggtccgtcgccagcgccatttcataatagggtgcaacagcaaaagcgcccggtaacggctggttgttatttaacaaatcgtgcattcgcgggatcagcacccactgcaaccactccagtggttccatggtgtccataaagaacggttgggtactattaaattgatgcggctggggttcatcgtttcgccagtgctgatgttcacgcagtaacgcttcaagcgtctgcaactggaaacgaacgcggtcatgagtggtcataaagcaacttcaataagaaaaactgccgcgaaggatagcaggaataaaaaaagggagcactgtattcacagtgctcccggttcgtttcgcagcattccagctacttttgttgctccctgctcatccttgacaacttttcctctggccttgcggccaatcgttcatcctgaactattgcttcctgctcacaccaccccgatgtgatacttcatcctgaagtgtccctggccttcctgacccaccgaatcatcctgaccggttctcattctccatcctggaggtgtcctttaacgcgtcctgcgtcatcctcttcgcttcatccagaagcctttccctgaaacaccatcctggtgtgtcctgcagaagtgtcatcatcctgatgttcacttcgttgtctgactccctgtcgacgaagatagaatcgtctttttcgcgaagtcttacaaggcgcttacagacaatgccttaaggaaaatttcatatgaaagttaagaattaacaatcaacattttgattttaaatgaaaataacgattcttatctttttaagtattcgcttatttcctggcgatctcctacagggtctgtaagagatctctcacaaccagatggggtatttggattacagaagaggcttaagttgattaaggaattccgcaagatttgaggctaaatgcgtccgtttacgtgttcccagcgtctctttgcacacttcaccggagagattacacaccgagatgacctctaactcttcttccagcgtcgcgataaatagcgtgggcggcagttttagccttttctgagtcaccagatgaccaatcagattttcctgcacccgacggaagtcgtcttcactccaggtttgcagcaatgtcagtttgatatcgccaaactgcgcgtgcatatccccggcaaactgagtcgtataaaaggtatgaattgtgggttgtatcacaatatcaaaagcgcgttcaaccgcgtttacattttgttccccggtaaacggctggggttgccagtatacggcatcttcggtagttgaaataatgcacggtgaaggaacaccgtacagttcctcacttaacggccagcttttatgctcttcatgccacgcatcgcagtagcgtgcagtaaaatctttcagggcttgtgcggtcaaatcgtccactaatttctctcttcacttaaaccagatacacttgtcgtttagtttatctggtttatgacggtgaaacatgtcttcttatgcaaaccatcaggcacttgcgggcctgactcttggaaaatcaaccgattaccgggatacctatgacgccagcctactgcaaggcgttccacgcagcctgaatcgcgacccgctgggtctgaaagcggataacctgccttttcacggtacggatatctggacgctgtatgaactttcctggctgaatgcgaaaggtttgccgcaggtcgctgtcggtcatgttgaacttgattacaccagcgtaaatctgattgagtcgaagagttttaagctctatctcaacagttttaaccagacgcgttttaataactgggatgaggtgcgccagacgctggagcgcgacttaagcacttgcgctcagggtaagattagcgtggcgttatatcgtcttgatgaactggaaggccagccgataggtcattttaatggcacttgcattgatgaccaggatatcactatcgataactatgaattcactactgactatctggagaatgccacctgtggtgaaaaagtagtggaagagacgcttgtcagccacctgctgaaatcaaactgcctgatcacccatcaaccagattggggttcgatccaaattcagtatcgtggacgccaaattgacagagaaaaactgctgcgttacctggtctcattccgtcatcacaacgagttccacgaacagtgcgtggaacgcatctttaatgacctgttacgcttctgccagccagaaaaattgagcgtttacgcacgttatacccgtcgtggcggtctggacattaacccgtggcgcagtaatagcgattttgtcccatcgaccacaagactggttcggcaataaattttttctcaattttgcgtgctggattcacgcagaaggttgtgaaaggacatcaggcagggctattgtaatcaaagggaatgacgatattcgtcccataaggagtttttcttgattacacatattagcccgcttggctccatggatatgttgtcgcagctggaagtggatatgcttaaacgcaccgccagcagcgacctctatcaactgtttcgcaactgttcacttgccgtactgaactccggtagtttgaccgataacagcaaagaattgctgtctcgttttgaaaatttcgatattaacgtcctgcgccgtgaacgcggcgtaaagctggaactgattaatcccccggaagaggcttttgtcgatgggcgaattattcgcgcgttgcaggccaacttgttcgcggttctgcgtgacattctcttcgtttacgggcaaatccataacaccgttcgttttcccaacctgaatctcgacaactccgtccacatcactaacctggtcttttccatcttgcgtaacgctcgcgcactgcatgtcggtgaagcgccaaatatggtggtctgctggggcggacactcaattaacgaaaacgagtatttgtatgcccgtcgcgtcgggaatcagctgggcctgcgtgagctgaatatctgcaccggctgtggtccgggagcgatggaagcgccgatgaaaggtgctgcggtcggacacgcacagcagcgttacaaagacagtcgttttattggtatgacagagccgtcgattatcgccgctgaaccgcctaacccgctggtcaacgaattgatcatcatgccagatatcgaaaaacgtctggaagcgtttgtccgtatcgctcacggcatcattatcttccctggcggtgtgggtacggcagaagagttgctgtatttgctgggaattttaatgaacccggccaacaaagatcaggttttaccattgttcctcaccggcccgaaagagagcgccgactacttccgcgtactggacgagtttgtcgtgcatacgttgggtgaaaacgcgcgccgccattaccgcatcatcattgatgacgccgctgaagtcgctcgtcagatgaaaaaatcgatgccgctggtgaaagaaaatcgccgcgacacaggcgatgcctacagctttaactggtcaatgcgcattgcgccagatttgcaaatgccgtttgagccgtctcacgagaatatggctaatctgaagctttacccggatcaacctgttgaagtgctggctgccgatctgcgccgtgcgttctccggtattgtggcgggtaacgtaaaagaagtcggtattcgcgccattgaagagtttggtccttacaaaatcaacggcgataaagagattatgcgtcgtatggacgacctgctacagggttttgttgcccagcatcgtatgaagttgccaggctcagcctacatcccttgctacgaaatctgcacgtaatctccctcccccggtgacgtttgttgccgggttttctcgtttttggtcacatacccatcaatttatttcatttgttatatgaatgtttcttaccaccctcacgcgataaatatcattgcagttaatatgtcatacaatttatgttgtaacgcaaacgtttccctattttcataaaccacattttatcgctatgaaaaagaaattatcgccatgattaactaaaagtattgattttttcagttcaacctacatatattgcgcgccccggaagaagtcagatgtcgtttaatgggcaaatattgcccttaaattctcttttacttttgatttacagagtaaagcgttgggataatctatcttccaagtagattattgtatttgggatcaagatcactgatagatacataacttgtgtgtatctttccgccctcaaattattacggcggtaaatgattaagccatcgccgatagacagatttcatttttacggtcaggcaccttcccgagctgaactggctaaaagctgaattatttgcattcctccaggagaaatagatggaaacgactcaaaccagcacgattgcgtcgaaagactctcgtagtgcctggcgcaagacagacaccatgtggatgctgggcctttacggcacggcaatcggcgcgggcgtgctgttcctgccaatcaacgccggtgttggcggtatgatcccgctgatcatcatggctatccttgcgttcccgatgacattttttgctcaccgcggcctgactcgcttcgtactgtctggtaaaaacccaggcgaagacatcaccgaggttgtagaagaacactttggtattggcgcaggtaaactgattaccctgctctacttcttcgctatctacccgatcctgctggtttatagcgtggcaatcaccaatacagttgaaagcttcatgtctcaccagctgggtatgacaccaccgccgcgtgcgattctgtcgctgatcctgatcgtgggtatgatgaccatcgttcgcttcggtgagcagatgatcgttaaagcaatgagtattctggtattcccgtttgttggcgtactgatgctgctggctctgtacctgatcccgcagtggaacggcgcagcactggaaacgctgtctctggacactgcatctgcaaccggaaacggtctgtggatgaccctgtggctggcaattccggttatggtgttctctttcaaccactctccgatcatctcttctttcgccgttgcgaagcgtgaagagtacggcgatatggcagaacagaaatgctcgaagatcctggcattcgcacacatcatgatggtgctgaccgtaatgttcttcgtcttcagctgtgtactgagcctgactccggcagacctggctgcggctaaagagcagaacatctcgattctgtcttacctggctaaccactttaacgcaccggttatcgcgtggatggctccgattatcgcgattatcgctatcaccaaatccttcctcggccactacctgggcgcacgtgaaggcttcaacggtatggtgattaaatctctgcgtggtaaaggtaagtctatcgaaatcaacaagctgaaccgtatcactgcgctgttcatgctggtaacgacctggattgttgccaccctgaacccgagcatcctgggtatgattgaaaccctgggcggcccaatcatcgcgatgatcctgttcctgatgccgatgtacgcaattcagaaagtaccggcaatgcgtaagtacagcggtcacatcagcaacgtattcgttgtcgtgatgggtctgattgcaatctccgcaatcttctactctctgttcagctaagtcctttcgcgccgctttcgggcggcgcttcctccgttttaacgcgatgtatttcctatgattagcgtattcgatattttcaaaatcggcattggcccttccagttctcataccgttggaccaatgaaagcgggtaaacaatttaccgacgatctgattgcccgtaatctgcttaaagacgtgacccgcgtggtggttgacgtgtacggctcgctctctctgaccggtaaaggccaccacactgatatcgccattattatgggcctggcgggtaacctgccggataccgtggatatcgattccatccctggttttattcaggatgtgaatactcatggtcgcctgatgctggcaaacggtcagcatgaagtggagttcccggttgatcagtgcatgaacttccatgcagacaacctttctctgcatgaaaacggtatgcgcattaccgcgctggcgggcgataaagtcgtttacagccagacttactactctattggcggtggctttatcgttgatgaagagcattttggccagcagaatagcgcaccggttgaagttccttatccgtacagttcagcagccgatctgcaaaaacattgtcaggaaaccgggctgtcactctctggcctgatgatgaaaaatgagctggcgctgcacagcaaagaagagctggaacagcacctggcgaacgtatgggaagtcatgcgtggcggtattgagcgcggtatttccaccgaaggcgtgttgcctggcaaactgcgcgttccacgccgtgctgcggcactacgccggatgctggtcagccaggataaaaccaccactgacccgatggcggttgttgactggatcaacatgtttgcactggcagtgaacgaagagaacgctgctggcggacgcgtggtgactgcgccgactaacggtgcgtgcgggattatcccggcagtgctggcgtactacgacaagttcatccgcgaagtgaacgctaactcactggctcgttacctgctggtagccagtgccattggttctctttataagatgaacgcgtcaatttctggtgctgaagtcggctgccagggtgaagttggtgtggcgtgctcaatggcggcggctggtctggcagaactgttaggtgcaagcccggcgcaggtgtgcatcgcggcggaaatcgccatggagcacaacctcggtctgacgtgtgacccggtcgccggacaggtccaggtgccatgcatcgagcgtaacgccattgcggcagtaaaagcggtgaacgccgcacgtatggcgctacgccgtaccagcgagccgcgcgtctgcctcgataaagttatcgaaaccatgtacgaaacaggtaaagatatgaacgccaagtaccgcgaaacctctcgcggcggcctggcaatgaagatcgttgcctgcgattaatcgctctccagaggcctcgttttgcgaggcctcttcccgatttctcatccagccgtagcctgttccggcatcgaatgttacccttatcgcctgatctttaagggggttatcgtggctgttcatttgcttattgtcgatgcactgaatcttattcgtcgcattcatgccgttcagggatcgccctgtgtcgaaacctgccagcatgcgctcgatcagctcattatgcacagccagccaacccacgcggtcgccgtttttgatgatgaaaaccgcagtagcggctggcgtcatcagcgtttaccagattacaaagcgggtcgaccgccaatgccggaagagttgcacgacgagatgcctgcattacgcgccgcctttgagcaacgcggcgtcccgtgctggtcaaccagcggcaacgaagccgatgacttagccgccacgctggcggtcaaagtgacacaggccgggcatcaggcaacgattgtttcgacagataaaggctactgtcagttactttcaccgacattacgtattcgtgattacttccagaaacgttggctggatgcgccatttatcgataaagaatttggcgttcaaccgcagcagttgcccgattactggggacttgcggggatcagcagttcaaaggtaccgggtgttgcgggaatcggaccaaaaagcgccacgcagctgctggtcgagtttcagagtctggaagggatatatgagaatctggatgcggttgccgaaaagtggcgcaaaaaattagaaacccataaagagatggcgtttctgtgccgcgatattgcccgcttacaaaccgatttgcatatcgacggcaatttacagcaattgcggttggtacggtaacggcgagccggatgcaaacgattatcaacacattgaatttaatgcacttatataccggataagacgcggctagcgtcgtatccggcattatcacatcagcgcatttaccaggcggtatggtaaagctctacaatatcctcaagcgttgcttcacgcgggttgccaccggtacaaacatcatccagtgccgcctgcgccagtgccggaatgtcttccttgcgtacaccaacatcacgcaaatgtggcggaataccgacatcacggttgagagcaaacaccgcttcaacagcggcattacgcgcctcttccaggctcataccttccactttcacgcccataacgcgcgcgatatcgcggtacttctcaccggtaaagtcagcgttatagcgcatgacatgcggtaacaggatggcgttcgcaacaccgtgtggagtgttgtaaaacgcgcccagtggatgcgccataccatgcaccaaccctaacccaacattcgagaagcccatacccgcaacatactgcccgagcgccatttcttctccggcatccttatcaccagcaaccgatcctcgcagcgccccagcaatgatttcaatcgctttaatgtgcagtgcatcggttagcgcccacgcgccacgggtaatatacccctcaatagcatgagtgagcgcatcgacacccgtcgcagctttcagcgctggaggcataccatccatcatgtcagcgtcaataaacgccacctgcgggatatcatgcggatcaacgcaaacaaacttgcgccgtttctcttcgtcagtgatcacgtagttaatggtcacttctgccgcagtacctgctgtggtaggaattgccagaatcggtacactgggtttattggtcggggaaagcccttccaggctacgcacatcggcaaactccgggttgttgctgataatgccaatcgctttacaagtatcctgtggagaaccaccaccaatagcgatcaggtaatccgcgccgctattctggaatacaccgagcccttctttgacgacagtaattgttgggttgggcactacgccgtcgtaaatcgcccatgccagccctgcagcatccatcttatcggtcactttcgccaccacgccgcattgcaccagcgttttatcggtgacgatcagcgccttctgataaccacggcgtttcacctcatcggttaaagccccaacagcaccccgaccaaaccatgccgtttcgttcagaatcattctgttagccatcatccttctccttgttgctttacgaaattactcttcaatccgtaacccataggttttgaatttctccagcactacggcaatctcttcatcgctcagcactggcaccgggtccgtaatcgccagggtcgtcacgtaaagttgcgccagcacttcaacttcatgcgccagccataacgctttttccagattcacctcacaagcgataagcccatgatgttgtaacaaagttgccttacgatttttgagagccagcgcaacatgttcagaaagttcgcgtgttccaaaggtcgcataaggcgcgcaaggaatagaattaccacctgccgccgcaatcatgtagtgaatagcggggatcggtcggttaagaatggaaactgctgtgcaatgaacggcatgattgtgaacaaccgcgttggcatccggtctgctttgataggccgccatatggaaacgccattcgcttgaggggagctttccttcctcatgtttaccgttgccatcaataaagacaatatgcgactccgtcagtttttcatatggaatgcctgtaggcgtaatcagcatcccatcctgataacgtacactgacgttccccgctgtcccctggttcagtcccaggcgggtcatttccaggcaagtgtcaataatctgacgagcaagtttatttcgttccattagctacctctctctgattcaaaacagggcaataatgttgttcctttcacactattgaattagccgtttaattacccaccatcttcttcctgattaacaagaaagaaattcacaagcttatattttgtgacctagctcaactaatcacagtaaataactgcaagttctctttttataaccccattaaaaatgaccgctcttaaaaatatttatcaaaacggtcatttttctattcacccaagccaggaatgcccgttttcggcataaacaattaatacagtcatctggtttgtgttttttatgatttattttctgaaacgggcatgaaatttcgattattaaagtgatggtagtcacataaagtcaccttccagctaataagtgtgaccgccgtcatattacagagcgttttttatttgaaaatgaatccatgagttcatttcagacaggcaaatattcactgatatgaagcccgaactcgctggttttgcacttttgaaaacataaccgattacgtgcttaagcttctgaacctaagaggatgctatgggaaacacatcaatacaaacgcagagttaccgtgcggtagataaagatgcagggcaaagcagaagttacattattccattcgcgctgctgtgctcactgttttttctttgggcggtagccaataaccttaacgacattttattacctcaattccagcaggcttttacgctgacaaatttccaggctggcctgatccaatcggccttttactttggttatttcattatcccaattcctgctgggatattgatgaaaaaactcagttataaagcaggaattattactgggttatttttatatgccctgggcgctgcattattctggcccgctgcagaaataatgaactacaccttatttttagttggcctatttattattgcagccggattaggttgtctggaaactgccgcaaacccttttgttacggtattagggccggaaagcagtggtcacttccgcttaaatcttgcgcaaacatttaactcgtttggcgcaattatcgcggttgtctttgggcaaagtcttattttgtctaacgtgccacatcaatcgcaagacgttctcgataaaatgtctccagagcaattgagtgcgtataaacacagcctggtattatcggtacagacaccttatatgatcatcgtggctatcgtgttactggtcgccctgctgatcatgctgacgaaattcccggcattgcagagtgataatcacagtgacgccaaacaaggatcgttctccgcatcgctttctcgcctagcgcgtattcgccactggcgctgggcagtattagcgcaattctgctacgttggcgcacaaacggcctgctggagctatttgattcgctacgctgtagaagaaattctaggtatgactgcaggctttgccgctaactatttaaccggaaccatggtgtgcttctttattggtcgtttcaccggtacctggctcatcagtcgcttcgcaccacacaaagtcctggccgcctacgcattaatcgctatggcactgtgcctgatctcagccttcgctggcggtcatgtgggcttaatagccctgactttatgcagcgcctttatgtcgattcagtacccaacaatcttctcgctgggcattaagaatctcggccaggacaccaaatacggttcgtccttcatcgttatgaccattattggcggcggtattgtcactccggtcatgggttttgtcagtgacgcggcgggcaacatccccactgctgaactgatccccacactctgcttcgcggtcatctttatctttgcccgtttccgctctcaaacggcaactaactgaacatattttccgaataaagtgaggaatctgtaatgaaaaaaatcagcttaccgaaaattggtatccgcccggttattgacggtcgtcgcatgggtgttcgtgagtcgcttgaagaacaaacaatgaatatggcgaaagctacggccgcactgctgaccgagaaactgcgccatgcctgcggagctgccgtcgagtgtgtcatttccgatacctgtatcgcgggtatggctgaagccgctgcttgcgaagaaaaattcagcagccagaatgtaggcctcaccattacggtaacgccttgctggtgctatggcagtgaaaccatcgacatggatccaacccgcccgaaagccatttggggctttaacggcactgaacgtcccggcgctgtttacctggcagcggctctggcagctcacagccagaaaggcatcccggcattctccatttacggtcatgacgttcaggatgccgatgacacatcgattcctgccgatgttgaagaaaaactgctgcgctttgcccgcgccggtttggccgtcgccagcatgaaaggtaaaagctatctgtcgctgggcggcgtttcgatgggtatcgccggttctattgttgatcacaacttctttgaatcctggctgggaatgaaagtccaggcggtggatatgaccgaactgcgtcgccgtatcgatcagaagatttacgacgaagccgaactggaaatggcactgacctgggctgataaaaacttccgctatggcgaagatgaaaataacaaacagtatcaacgcaatgccgagcaaagccgcgcagttctgcgcgaaagtttactgatggcgatgtgtatccgcgacatgatgcaaggcaacagcaaactggccgatattggtcgcgtggaagaatcacttggctacaacgccatcgctgcgggcttccaggggcaacgtcactggaccgatcaatatcccaatggtgacaccgccgaagcgatcctcaacagttcatttgactggaatggcgtgcgcgaaccctttgtcgtggcgaccgaaaacgacagtcttaacggcgtggcaatgctaatgggtcaccagctcaccggcaccgctcaggtatttgccgatgtgcgtacctactggtcaccagaagcaattgagcgtgtaacggggcataaactcgatggactggcagaacacggcatcatccatttgatcaactcaggttctgctgcgctggacggttcctgtaaacaacgcgacagcgaaggtaacccgacgatgaagccacactgggaaatctctcagcaagaggctgacgcttgcctcgccgctaccgaatggtgcccggcgatccacgaatacttccgtggcggcggttactcttcccgcttccttaccgaaggcggcgtcccgttcaccatgactcgtgtcaacatcatcaaaggcctgggatcggtactgcaaatcgcggaaggctggagcgtggaattgccgaaggatgtgcatgacatcctcaacaaacgcaccaactcaacctggccaaccacctggtttgcaccgcgcctcaccggtaaagggccgtttacggatgtgtactcggtaatggcgaactggggcgctaaccatggggttctgaccatcggccacgttggcgcagactttatcactctcgcctccatgctgcgtatcccggtatgtatgcacaacgttgaagagaccaaagtgtatcgtccttctgcctgggctgcgcacggcatggatattgaaggccaggattaccgcgcttgccagaactacggtccgttgtacaagcgttaatacattactccctgatgtgatgcccggtcgctccggctaccgggcctgaacaagcaagagtggttagccggataagcaatgttatccggctatattgcaggagcgattatgaaacaagaagttatcctggtactcgactgtggcgcgaccaatgtcagggccatcgcggttaatcggcagggaaaaattgttgcccgcgcctcaacgcctaatgccagcgatatcgcgatggaaaacaacacctggcaccagtggtctttagacgccattttgcaacgctttgctgattgctgtcggcaaatcaatagtgaactgactgaatgccacatccgcggtatcgccgtcaccacctttggtgtggatggcgctctggtagataagcaaggcaatctgctctatccgatcattagctggaaatgtccgcgaacagcagcggttatggacaatattgaacagttgatctccgcacagcggttgcaggctatttctggcgtcggagcctttagtttcaatacgttatataagttggtgtggttgaaagaaaatcatccacaactgctggaacgcgcgcacgcctggctctttatttcgtcgctgattaaccaccgtttaaccggcgaattcactactgatatcacgatggccggaaccagccagatgctggatatccagcaacgcgatttcagtccgcaaattttacaagccaccggtattccacgccgactcttccctcgtctggtggaagcgggtgaacagattggtacgctacagaacagcgccgcagcaatgctcggcttacccgttggcataccggtgatttccgcaggtcacgatacccagttcgccctttttggcgctggtgccgaccaaaatgaacccgtgctctcttccggtacatgggaaattttaatggtccgtagcgcccaggttgatacttcgctgttaagtcagtacgccgattctacctgcgaactggatagccaggcagggttgtataacccaggtatgcaatggctggcatccggcgtgctggaatgggtgagaaaactgttctggacggctgaaacaccctggcaaatgttgattgaagaagctcgtctgatcgcacctggcgcggatggtgtgaaaatgcagtgtgatttattgtcgtgtcagaacgctggctggcaaggagtgacgcttaataccacgcgggggcatttctatcgcgcggcgctggaagggttaactgcgcaattacagcgcaatctacagatgctggaaaaaatcgggcactttaaagcctctgaattattgttagtcggtggaggaagtcgcaacacattgtggaatcagattaaagccaatatgcttgatattccggtaaaagttctcgacgatgccgaaacgaccgtcgcaggagctgcgctgttcggttggtatggcgtaggggaatttaacagcccggaagaagcccgtgcacagattcattatcagtaccgttatttctacccgcaaactgaacctgaatttatagaggaagtgtgaaatgctgaaaacaatttcgccgttaatttctcccgaactattgaaagtgctggcagagatgggacatggagatgaaattattttttccgatgctcactttcccgcccattcgatgggaccgcaggtgatccgcgctgatggcctgttggtgagcgacttgctccaagcgattatcccattatttgagctggacagttatgccccgccgctggtgatgatggcagcggtagaaggtgacactctcgatcctgaagtagaacgacgttaccgtaatgcgctttcactacaagccccgtgtcctgacatcatccgcatcaatcgttttgcgttttatgaacgggcgcaaaaagcctttgcgatcgttatcacaggcgaacgagcgaagtacgggaatattcttttaaaaaaaggggtaacaccgtaatctcatatcggtacgcccgcatgacgcgggcggttatcgaatgatggggtgaaaaatatgaaagcggcacgccagcaagcgatagtcgacctgctgctgaaccataccagcctgaccacggaagctctctctgaacagctaacggtcagtaaagaaaccattcgtcgcgatctcaatgaattacagacgcagggtaaaattctgcgcaatcatggacgcgctaaatatatccaccgtcaaaatcaagacagtggcgatccctttcacatcaggctgaaaagccattatgcgcataaagcagatatcgcgcgcgaggcgctcgcgtggattgaagaagggatggtgatagccttagacgccagttcaacttgctggtatctggcacgccagttgcctgacatcaacattcaggtcttcaccaatagccatccgatttgccatgaactcggtaaacgcgaacgcattcaactgatcagttccggcggcacacttgagcgcaaatatggctgttacgtcaatccctcgctgatttcccaacttaaatcgctggaaatcgatctgtttattttttcttgtgaagggatcgatagcagcggcgcactgtgggactccaatgcgatcaacgctgattacaaatcgatgctattaaaacgtgccgcgcaatcgttgttattgattgataaaagtaaatttaatcgttcaggggaagcccgcatcgggcatctggatgaggtaacgcacattatttctgatgagcgccaggttgcaacttctttggtaacagcctgacggaaagggtagcaggccgaagacgacgccccggccttgcctgttatcgctcgtcgcgacgaccacccaccgcagcccagatgcggcggacgtgcaccgtcacttcttcgcgatcgtgatacaactgccgcgcctgaatctgagcatttatgccatgttcatcaagctgtgcctgaatatacgccagattgtgtgatacttcttcgtagcgttttttcatcggcagtttgagattgaaaatggtttcacggcaccagccattaaccagccactgcgccatcaatgccgcaactttagccggtttttcaaccatatcgcataccatccaggagatattgctgcgtgtcggacggaatttgaaaccgtcttcccgcagccacgtcacctgcccggtatccatcagactttgcgccatcgggccgttgtcgacggaataaacccacatgttgcgcttcaccagttggtaggtccagccgccagggcaagcgcctaaatccaccgcccacatcccgttcgccaggcgttcatcccactcatccgcaggaataaacacatgaaatgcctcttccagtttgagcgtggaacgactcggcgcctctgccggaaatttcaggcgcggaatgcccatatagaacggcgaattattgttgctgtatgagtaaccggtatagcagcagcctggtgcaataaagaatacatgcacaaccggacgcttcggcgtttcatagttcgccagcaccccggcatcgcgcaaggcagcgcgtagcggcacggtgaatttacggcagaatttcagcaactctttgctttcgttggtatcggcaacttcaacacgcagttcaccgcccttctctactacgccctgcaacatgtcgacaatgggggtaatacgatcttctggcggcaaatgctgcaagagttcccccaccacaaaccactggcgggcaaaaattaatgaactgaacggcagctcacggattaacttatcgccatcatcaggttgataacattcataaatgacataacccgcattctctttcacgcgggcaaaaccgaaaatttcccgctggccggctttatcggtaatttctgcggcgcactctttttcaaagcccggacggcacagcaatacaaccttattcatgacttacgcccttgcactttaaacggatagcaccaactaacattaacgcccagcccgcgaggaagctcacgccgccaaccggtgtgacaaatgcccacaaacgcagatgggacagcgccaggcaataaaggctgccgctgaacaacaccgtgcctaacgcgaggaaaacgctactccagtaaaaccagatactgatgcgacgctgcattgccaccgccagacctaagatcgccagcgtatgaaacgcctggtattcgaggccggtctggatccagcccatctcaacggcccccatggttttacttaacacatgcgcgccaaaagcgcccagagccacaaaaatgaagccgctaatggcggcgaaaatcagcataaaacggctggtcatggtcgtaccctacgtaaattattgttcataacgaaagcggaatttttcttgttcagcagcggctttcgccaggatccattggcgaaaggcggctattttacccagttctgcctggctgtcatgacaaaccagataaaaagcgtttttactgaccagaacatcattaaacgggcaaacaagacgtccggcctcgatttcagattgcgccatcacgttatttgccagcgccactccctgcccgtgaatagccgcttgcagcaccatggcgctatgactaaaaattggcccttgctgaacgttgatatgatttaaccccaactgtcgggtatatgtctgccagtcacggcgtgacgcatcatgtaataacgtatgtttagccagatcttccggggtcttcaagggtttttcgcctgtcagcagtagcggcgaacacaccggcaataaatattcggcgtacagtttttccacccgtagccccggccagttgccccgaccataaaatatcgccacatcaacatcatccgccagcttatcttcctgacgatcaaccgcctggattcgaacgtcaattcccggataagctgaattaaagctggaaagtcgcggaaccaaccaatgaatggcgaaactggggagtaaactgaccgtcaacgcccccttggcgctacgggcctggagtttacgcgtcgcttcggttaattgcgaaaatatctctttgatatcgaggaaatagctttgcccttcctcggtcagcaggagtgaacgattacggcggcggaacagttttagccccaaaaaatcctcaagagacttgatttgatgacttactgcggcctgggtcacgaaaagctcttctgctgcgcgagtgaaacttaaatggcgtgctgcggcatcaaaaactcgtaaggcatttagcggtggtaatcgtttagacatggcttttaaactttgatgttaaattaatttaacaattagatcacactgtgtaacctattagtttttttaatctgagccattataaattgtccgttgagcttctaccagcaaatacctatagtggcggcacttcctgagccggaacgaaaagttttatcggaatgcgtgttctggtgaacttttggcttacggttgtgatgttgtgttgttgtgtttgcaattggtctgcgattcagaccatggtagcaaagctaccttttttcacttcctgtacatttaccctgtctgtccatagtgattaatgtagcaccgcctaattgcggtgcttttttttaccttgcgatcgcgaattactgatccagttcgaccatctctttcacgtcagtacggttgatctgctgtttgttgccattagcgtctttatacgaaatcataccggtatcgttatcagtctgtggtttgccgtcagagacgatggtacgtccgtcattggtgtgcatcacatagttcgaaccggaacaggcgctcagggcaaaagtcagcatacaggcagaaataattgcggcagtctttttcatcatcttctccttaaagcgattaataaatcttaatagtattgattaacaggctaaaattaacgcctaacactattcagcatatgttacttacgcggcttcgccaggatatccagataattctgatggttagcactctccttgtatcaaagtgaattttgcgtcacgatcggtgcatcaagccgaggagtaccatgaacgtttttaatcccgcgcagtttcgcgcccagtttcccgcactacaggatgcgggcgtctatctcgatagcgccgcgaccgcgcttaaacctgaagccgtggttgaagccactcgacagttttacagcctgagcgccggaaacgtccatcgcagccagtttgccgaagcccaacgcctgaccgcgcgttatgaagctgcacgagagaaagtggcgcaattactgaatgcaccggatgataaaactatcgtctggacgcgcggcaccactgaatccatcaacatggtggcacaatgctatgcgcgtccgcgtctgcaaccgggcgatgagattattgtcagcgtggcagaacaccacgctaacctcgtcccctggctgatggtcgcccaacaaactggagccaaagtggtgaaattgccgcttaatgcgcagcgactgccggatgtcgatttgttgccagaactgattactccccgtagtcggattctggcgttgggtcagatgtcgaacgttactggcggttgcccggatctggcgcgagcgattacctttgctcattcagccgggatggtggtgatggttgatggtgctcagggggcggtgcatttccccgcagatgttcagcaactagatatcgatttctatgctttctctggtcacaaactgtatggcccgacgggtatcggcgtgctgtatggcaaatcagaactgctggaagcgatgtcgccctggctgggtggcggcaaaatgattcacgaagtgagttttgacggcttcacgactcaatctgcgccgtggaaactggaagcaggaacgccaaatgtggctggtgtcataggattaagcgcggcgctggaatggctggcagattacgatatcaaccaggcagaaagttggagtcgcagcctggcgacgctggcggaagatgcgctggcaaaacgtcctggcttccgctcattccgctgccaggattccagcctgctggcctttgattttgctggcgttcatcacagcgatatggtgacgctgctggcggagtacggtattgccctgcgggccgggcaacattgcgctcagccgctactggcagaattaggcgtaaccggcacactgcgcgcctcttttgcgccatataatacaaagagtgatgtggatgcgctggtgaatgccgttgaccgcgcgctggaattattggtggattaatgacgaacccgcaattcgccggacatccgttcggcacaaccgtaaccgcagaaacgttacgcaataccttcgcaccgttgtcgcaatgggaagataaatatcgccagttgatcatgctggggaaacagcttccggctttgccagacgagttaaaagcgcaggctaaagagattgccggatgcgaaaaccgcgtctggctgggatataccgtgactgaaaacggtaaaatgcacttctttggcgatagcgaagggcgcattgtgcgcggcctgctggcggtgctgttgactgccgttgaggggaaaaccgccgccgaattgcaggcacagtcgccgctggcattgtttgatgagctgggattgcgtgcgcaacttagcgcctcacgcagccaggggttaaatgcgttaagcgaggcgattatcgctgcgacgaagcaggtttaagcatagaaccgggtcggataagacgttcgcgtctcatccgacctgattgtttaaccctgacgcgccgctttcgccatcatcttcttcagcgcatgagaaaccgcaacaaacccaaaggtggcggtcaccatcgttgccgcgccaaatccagatgcacaatccatccgcttcggcccttctgccgtggctttcatcgcacacacagtaccgtctgactgcgggtacaccagcgcttcagtagaaaacacgcaatcgacgccgagcttacctttactgtttttcactacgccaaaatcgcttttcaggcgctcgcgcaacttcgccgccagcggatcctgaatcgttttcgccagatcggtaacctgaatctgcgtcgggtcaatctgcccacccgcgccaccggtcgtgaccagcgggattttattgcgccgacaataagcaatcagcgccgctttgggccgtacactatcaatggcatcaatcacgtacgaataacccacgctcatatactgcgctacgttatccggcgtcacgaaatcatccaccaccgttacacggcactccgggttaatctggcgaatacgctccgccatgacttccgcttttgccagcccgacgttatcgcgcagagcgtgaatttgccgattggtattggtgacgcacacatcatccatatcgataagcgtgattgcgccaatccccgtgcgcgccagcgcttccgccgcccaggaaccgacaccaccgataccaaccacacaaatatgcgcgtcagcaaacagttgcaacgctttttcaccatacagacgcgctgtgccaccaaaacgctgacgccatgcatcactaattaccacagacatagcacctcagaattaaaaagggtgaggttatccctcaccctgtcgtatccgtaaaaacggtatacagaataacacatcagccgctaaagacgttacctgcgcccggggcggttttcagcacccagacacgtccatagtggttgtaccaacctgcgcggtgtccggcttccggcccgatcccttgatagatatcgaagtgttggcctttgattgcaccaccgacatccagcgccaccatcagacgcagttcgtactgaccattaaatttgccgttattatccagcaacggcacttctgccagcaaggtagtacctggcggaataatggaacgatcagaggcaactgacgcgcgaccaaccagcggcaccgcacttgcccctttcaccggtgcaaaagattgcggtttaaagaagacgaaagacgggttctgttccagcagctcgcgaacctcggcttcactgtgtgtttcgccccagtgacgaatcgcctgcatcgacatatcttcttttttcacttcgccacggtcgatcagcaccttaccaatgctgcgataggcatgaccgtttttccctgcatagctgaaaaagttaagcggactgccatcaccaaagtcgatatacccactaccctgcacatccataatgaagttatccatcagggagttactgtaagcgagaatatatttatcactcaatgcccccgcgtagatctccgcacgagacggcagacgaccacgttttggcggcatacggtaaataggatactggaactcgccctggcgggtatggcgcgcctgaattaccggcgtgtaatagcctgtaaactgcacgttaccatagttgtcggcaccttccatctgccaggcatcaatgccgaactggcgcatattgcgggtatcaccgcctgcgcgcagccactcttgcaccgcgttataaacattactctggttgccatacagacgcggtgacgaattacggatatggttaatttgctcggcaaaatcaccggcgttaatcggcgcgccaacggcatctggctggttcaccagagagaaaggctgggtaaatttcccgtctttatattgctgtccgcgatcggttggtttggaagagcaggcggcaagcattgccacaaccgtgcccataagaaggtactttacccaacgtcctttcattgttctcttcttcaggttaaaaaataaggcgcaacgaagataacaaaccgccgcgtttaatgaaatgagcagcctctccctgacgcaaattttgcacaaaaaataggctttagtgatttgtttttgttcaaaatcatgccagatccgtgatcggggtaaaaaaaaggttgcatgaaaacgcgagcggagtatagtgcgcatccacggaggcggggtggagcagcctggtagctcgtcgggctcataacccgaaggtcgtcggttcaaatccggcccccgcaaccaattaaaatttgatgaagtaaagcagtacggtgacgcggggtggagcagcctggtagctcgtcgggctcataacccgaaggtcgtcggttcaaatccggcccccgcaaccaatcaaatttgatgaagtaaaagcaatacggtgacgcggggtggagcagcctggtagctcgtcgggctcataacccgaaggtcgtcggttcaaatccggcccccgcaaccaattattgaacaccctaacgggtgtttttttgtttctactctcccataaaaaaagcgccattcagcgcctttttatcatccccttctcgccagcgttgccccatcggcaaaatacgctttaatccccgcaagaatagactccgcaacttcctgctggaaagtcgccgttttcagtttacgctcttcctcaacgttactgataaacgccgtttcgaccagaatggagggaatatctggtgcctttagtacggcaaacccggcctgttcaacttgatttttatgcagcttgttgattttaccgagcttattcagcactgctttaccaaacttaaggctgtcagcaatggtcagcgactgcaccatatcgaacatggtgtggtcgacatagcggtcaccgcttttgctcacgccaccaatcaagtccgaggcgttctgggtttgtgccagatattttgccgcagtactggttgcacctttggttgagagcgcaaacaccgaggaaccgctcggctggcgactggtaaaggcgtcggcatggatagagacaaacaggtcagcacgctgtttctgggcttttgctacgcgcacttgcaacggaatgaagatgtcttcattgcgcgtcatgtacaccttcatattgccctctttctcgatcagagagcgcaaacggcgagctatttgcaataccacatctttttcgcgcgttttgtatttccccaccgcaccggagtcttcgccaccgtggccagggtcaagcataatgacaatcggacgatcgcgccctgctttacctggttgtggaccactttgcgctggcggcacctgcttttcgaggtcgcctttgttgtaatcctccagcagcgccagcagcgggtcctgcatatcctgtgcattggccggatagaggtccatcaccagacgctctttaaacccggcgaccggcgcaagggcaaacagctgcggttttacgttttgctttaattcaaaaaccatccgtacggtttgcgggtcaaattgcccgacgcgcgccgacttgatgaacgggtcgtctgcacgaatttgtgccgccatccccttgagtaccgagttcaggtttacatcttcgatatccaccaccacgcgttcagggttactcaacgcgaactgcttatatttcagctgacgatttgattctaccgtcacgcgggtgtagctggacgcaggccagacgcgcaccgccacgacctggctaaccgcagccaggctgacctgacttacgctcaatagccacatagcgcccgcgccttgcagtaaacgacgacggctgattgcagtgttggatcctgacatgcctctcccgagcaaaagaaatctaagctgtgtaacaagtaaacgactaatttgaccggaaactttagcgaaagacgcataatctgtcatctaataaacggtaaacattctttttatattcacggcattactgataaaaaagtcgctctcgcataaaatttacacttgcaccctgcgaaaaaacagaataaaaatacaataatttcgaataatcatgcaaaggggtgtgccgtggtaaaggaacgtaaaaccgagctggtcgagggattccgccattcggttccctatatcaatacccaccggggaaaaacgtttgtcatcatgctcggcggtgaagccattgagcatgagaatttctccagtatcgttaatgatatcgggttgttgcacagcctcggcatccgtctggtggtggtctatggcgcacgtccgcagatcgacgcaaatctggctgcgcatcaccacgaaccgctgtatcacaagaatatacgtgtgaccgacgccaaaacactggaactggtgaagcaggctgcgggaacattgcaactggatattactgctcgcctgtcgatgagtctcaataacacgccgctgcagggcgcgcatatcaacgtcgtcagtggcaattttattattgcccagccgctgggcgtcgatgacggcgtggattactgccatagcgggcgtatccggcggattgatgaagacgcgatccgtcgtcaactggacagcggtgcaatagtgctaatggggccggtcgctgtttcagtcactggcgagagctttaatctgacctcggaagagattgccactcaactggccatcaaactgaaagctgagaagatgattggtttttgctcttcacagggcgtcactaatgacgacggtgatattgtctcagaacttttccctaacgaagcgcaagcgcgggtagaagcccaggaagagaaaggcgattacaactccggtacggtgcgctttttgcgtggcgcagtgaaagcctgccgcagcggcgtgcgtcgctgtcatttaatcagttatcaggaagatggcgcgctgttgcaagagttgttctcacgcgacggtatcggtacgcagattgtgatggaaagcgccgagcagattcgtcgcgcaacaatcaacgatattggcggtattctggagttgattcgcccgctggagcagcaaggtattctggtgcgccgttctcgcgagcagctggagatggaaatcgacaaattcaccattattcagctcgataacacgactattgcctgcgccgcgctctatccgttcccggaagagaagattggggaaatggcctgtgtggcagttcacccggattaccgcagttcatcacggggcgaggttctgctggaacgcattgccgctcaggcgaagcagagcggcttaagcaaattgtttgtgctgaccacgcgcagtattcactggttccaggaacgtggatttaccccggtggatattgatttactgcccgagagcaaaaagcagttgtacaactaccagcgtaaatccaaagtgttgatggcggatttagggtaagcgatgaaaatcgccggatgcggcaggcgtaacactcgtgcgtcgcatccggcaattacgtttatccccgcgaactaaacaacgccgccagaccactgcgccgctcagtacgagtggcgattgccgcacttaatatacgctcatcggcatacagcgacagacggcgacgcgcgcgggtcaccgcggtgtataccagctctcgcgttactatcggcgtgcgttggctcggtaaaatcaacgccgcatggtcgaactccgatccctgcgatttatgtaccgtcatcgcccacgtagtttcgtgctctggcaagcgactcggttgcacagacttaatattgccgtccggcatcgcaaaccagacgcgcgtcccctgcccgcgatccagcgcaataccgatatcgccattaaacaacccaagcgcactgtcattacgggcaatcatcaccggtcgaccttcgtaccaacgagagtgcgaatgacgatgaattttgcgcttctgttgcataaactgctcaattcgctcattcagtccagccacgccaaatggcccttcccgcagggcgcacaaaagttggtactcattgaacgcctgaatgattaaatccggctcggcacgcgcttgcagcagatccagataacgtccataacccgcaagagcttcctcaagcatcgcaatataatcttcgccgctctgtaaaagccgtttttcaatatcagtaaaatcctgctgaaaaacggttttcactgccgttttatcaccacggttgatcgccgcagctaactgaccaatgccagaatcgctgccgaaacgatagcttttttgcagcaggcagagactgtcgcgcaaagatgccgcttctgtgccggttcctgccggaacgtgagttcccgtcaggcggcttagctgcccggcacgctcggcggtaaagccggcattggcataagcgcagatatcgcccagcacagccccagcctcaaccgaggccagttgatcacgatcgccgagaaagatcactcgcgcatgatcgggcaaggcgtcgatcagtctcgacatcataggcagatcgatcattgacgcttcatctaccaccagcacatcaagatgcagcgggttaccggcatgatgacgtaaacgctggctacccggctgcgcgcccagcaatcggtgcaaagtgctggcatcttccggaatgcgtttcttttgttcatcggtcagcggtaactgtcgcaaagccttgccgagagattcggttaagcgcgcggcagctttacccgttggtgcagccagacggatacggcagcgttcgccgtcggccatttgaattaacgctgccagcaacttcgccacggtggtcgttttaccggtgcctgggccgccggaaatcaccgagatccgccgcgtcagcgccactgctgccgccactttttgccagttaatttcatcgcttactggaaaaagtttgtccagggtttgcgccagtagagcttcatcaacctcaatggcatgattcacctcattgaagaagcgcgctaccgtccgctcgttacaccacatgcgattcaaataaagacgatcgccacagaggatcatcggcgtgggttcatctcccctgctgaccgcttgagaagccagcaagcattcttcccaattttgtagctcaccgatttcactgacacaggtcgccaacagcggatgcgacgcctcgttattttccagtcgtgaaagcggcaaacagacgtgtccctctccggcatcatgacttaacagtgccgccgcgagggtgacggcaggatgttcatctcccgccacggtcagggcaaattgcacatccagcgggcgtagctgtttgtgctccacagcttccagtaattgcttttgcaatttcattacgcctcctccagggtcataccggcaaacatctcatccatcagggcaatcaacccggcgttgggtcgggttgtgtaaatcccttgttgcggatgttctttatcaacgccacgcaggaacagatagataacgccgccaaagtgacgatcatagtcgtaatcagcaatgcgatggcgcagataacgatgcagcgccagggtataaagctgatattgcagatcatagcggtgtgcctgcatcgctgctgccatagcctgttgggtgtaagccgaactgtcttcacccagccagttggatttatagtcgagcaggtaataacgcccttcgtggcggaataccaggtcgataaagccttttaacatgccgcgtacctgcatgaactccagcggcgggcagccagcggatagcgggtcaaactggcgaattagtgcatcaagctggctggcgatgagcggttcgctaatcggcaggtaaaactccatctccacctgtttatcgcggtcggaaagctgactcaggctaacacccgtttcattgagaggtgcctggaggacagccgtgatccactcggtcaacaccggttcccactgcgattcaaagccgccgagttccagtttttcctgtacccagttcgggtcaaccggctgggtaaaatcgaggtcttcaaacaaactgtgcaagaatgtccccggtgacgcaccgcgcgggaactgatgcggtgttaacgtcggttcttcaacgacgctgaccacgcctgcggcatcaacatccagccgtggcatcagatcctgagcgataccgtgaccacgctgctgcaagccggagtagctggtgacacgccagttatcgccgggcaatcgttgtagtgtcctcgcattcagttctgcagttaaagcatcattaacctgccagggctggttatcaccagtttgtgccgtttgccaggcaatatcatcatcgcataacgcttcaatacaggtgcgaagccctgccgcatcttgcggttcccctttttgcagcaaacgcccgagcgcactttggtggacgtcggtgtcaccttttttatcgccacgacggcgcaccagcggtgcaacgccgagactgcaatgccaaaccgaacgcgtcagcgccacgtaaagcaaacgcagatcttccgccagacgttcgacctccgcgaggtcgacgctttctggcgcagcattaagatccaaaactgcctcaaacgagtggcgatcgtgataaaacgcctgatcctggacgcggaaattggtaataaatggcaaccagaccagcggatattccagccctttcgatttatggatcgtgacaatctgcaccagatgtttatcactttcgaggcgcatttgttggctggaggcattactgtctggctcgaggatatgttgcgataaccagcgtaccagcgcatgttcactttccagctgcgttccggcttcttgaagcagttcgctgatatgcaagatatcggtaagacgccgctcaccgcctgccgttgccagcaagttttctgcaatgttacgcgccgacatcagcgcccgcagcatcggcataacgccacgtttgcgccagatttgccgataaccatcgaactcttcgactaccgcatcccacgcatgttcgtcattattcagcgtttcaatatccagcgcattcagccccatcattgacgttgccagcgcactgcgcagggtgttctcacgttcgggcgtcatcaccgcctgcaacagccaaagcatttcctgcgcttccagagtttcaaaaacactatcgcggttcgaaaggtaaacggaagggatttccagcaacgttaaggcatcgcgcacctgggcggcctcctggcggctgcgcaccagcacgctgatgtccgaagcacgcaccggacgcgcgtcgtcgccgttcatcagcaacgcttcgccccgctgtccggcttgtagccagtcgcggatttgcgcagcacatacctgcgccatggtactttgatagtcgccaacgccgcagctttcgccttccatcagccacattttcatcgcaggctgcgtttcacctttaaagacaaaacgtaacgcctgatttttcccggctgatttcactggaataaacggtatttcgcgaaacatgaacgcgtcatcagtctggctgaaaagcttgttcacactgttcaccattccaggtgcggagcgccagttggtgtctaaagtgtagtgggcgtgaacttcactacgcgccttcatataagtgaagatatccgcaccccggaatgcatatatggcctgcttcgggtcgccaatcagcaacaatgcggtttctggctgatggtgccagatacggcgaaaaattcggtactgctgggggtcggtatcctgaaattcatcgatcattgccaccgggaatcgcgtacggatcgccgctgccaacacctcgccgctttcgctacgcagcgcggaatcgagccgacttaacatgtcatcaaaacccaattcgccacggcggcgtttttcacgcgctactgtttcgcggatctcagccaatgcgcgggtgatcaccagatcacggatcgacaatggttctgcaagcagttgatcgatcgcctcaaacagtggatgtcgcggggtttcccccccggctttcgtgcgatcttctaagaaacgctgggagaatttttccagcgactccggcaactgataactgtttgtctcttcttctgcccaggcgctgatcttgtcgatccatttagcctgattgctacggttaaacttgcgtcgatcaataccagaagattcgatcagcgcatccagttcacccactgcgtcgcgccactgctgttttaccgtatcaatacgcgccacaatttgcgcgtgacgggaagctagcgtttcatcatcgggcggcggtgctttgataaccggcgcttcgccttgcagataacgattaatatcgcgcagcaacgcctgcggccctttccaggtttcaaagacgacctgggctatttcacgcggcagcgggtagcagtggcgacgccagaaatcggcgcaggcctggtagcgtagcagagactcatcttcaatcagctgctgctcaaacagcatgccggattcaaaggcattcaggttgagcatgcgctggcaaaagccgtgaatagtaaagactgccgcttcatccatctgccgttcggctaacaacaaccactgcgcggcttgcgctttatcgtcgatctcttccagcaggtgttcgtacaatggattgtcggtggtttcacgcagacaggcgatgcgcaactcgtggatattgctacggatacgaccgcgcaattctgccgtggcagcctcggtaaaggtgaccaccagcagttcttcaacggtcagcgggcggggaaaggcggcggaaccgcctagtccaagtaacaggcgcaaataaagcgccgcaatcgtaaaggttttgcctgtgccggcagaggcttcaatcaggcgctcgccctgtaagggcaagcgcaaaggatctagtgtctcggcgacatcactcattcttttcactcatcaggggcattgtttgctgcaacgcgctgacgttctcccacactttccagccttcaggatgcacatattcggctttcccgttttggctgccggaaatctgcgacaggatagccatgccttgcggctcgactaccgcctgatggaagaaatcggccagtttttgcggcgtcagcagtttaatctgggccacgattttatcacgcgaatcgaagcgcatattgccgcgatcgaaatctttacttaacttcgatgcttcttcgccgagcgtttgcggtgcctgcagcatctgggtaattaccgcctgctggatttgcgcaaactcatctggcttcatcgctcgcaattttgcctctgcggttgggaaaaacgccttgtaacgctcccacaagaatgaaggctgtttatcattgctttgcaaaaggaagcccatgccccactgacgccccacgctcattggaaacgcaaacacggcatagcccaattgttcttcggtacgcaactgattgtagaaccacggctgtacgatctgccccaacagagagctataggctgagctggtgtattcatcgtagccagtcggtacaaataccgctgccagtgcggagtcggtgctgttaccggctttttcaaagatgacggattgttttttatcgaccactacatctttgtttcgacaccactctgaaccatcagcgcccaactgtttttgcacatcgcgtgccagcgttgttgcctgggcctcggtcatgttgccgataaccataaactctggtcgagcccctgattttaaggcgtcgcgataagccagcacctctttcaacgtaatggagggcaaaattttacgccgttcatctcgcgagaagtacggcacttgcgagagcatctgcgcgggcataatcgcctgctcaaacgctttacccttttctgcggaatccatcatctggttataccaggacttcgcctgctcaagctgatcttccgtagcggtatagctaaagtacccctcgagcaatgcctggaacagctgcggcagacgctgggtgtaaccattagcattaaccataaggccgttgttagcgttggtggaaaaacttatgccaccaaccgacgcctggttgcttaactgatcaagcgccagccctgcgagataatcattgagcgcaaacatcacctgattgcgggcgctgtccatggctttcggattacgcaaaatcaggctgacatcagctttgggttcgctggaaaaataacggcttggcgcatacaccacgcgcagattcgactcatcaacaatcagctctggatggtcatatttcttctctgacttaatcagcgagaaatcgtcaggaatataggggttaagctccggtaaggagagcgcaatattggcagctttttgctgccagtcagcgaaagtttgttcgctgattttatcgacctgatacggcgcatcgacaaaataagccgttttattgtgcggctctttcgggctgatataccagatacgcgcattctgcggcgtcatcatcgccagacgttcttttactgctttagcatcgtaccgatcggcaatattgactgcatccagcgtatgctcaaccggaacgcgaatcatggtatctgccagccattcgacgtaatccatatcacgggtgatcgacggataacggaagtcgatatccagcacattcgccagttcatcgaagtattgtttatcaatgcctttttcacgtaacagattgagatagctaaaaattgccgccacaacctgatcgcgattagccaggcctttatcggttaaagacgcagagatcgctaatacgccgctgttgccgttgacgataggatcggagttggcgctaatgccctcaactaatccctgcttttgcagccagtcggaaagtgtacctgggctgcgattaccaatcagataggtaatcaattcatccgttttactacggaacttcgctgagttgttatcgatgcgaaactcaacgcgcagaactttacgcggcattgccgggacgtaatgaatgataatgcccttttgcgcgtcggtgactaccggcacggtgatttccggttttttgctctctttgttcggcacgcgaccaaaggtgtccgccgccatttttgccaactccggcagcggtttattgctgtaaataaccgccttcatcagattggcggaatagtacttctcgtggaaatctttcagcgcctgctgcaccggattaccaggtttatcgcttaaagtttcgaggttaccaccagaaaactttgaaccggggtgtgccgggttaatggtttctgcgctgacctgtgccatgcgcatcccgtcacgcgtacgcgccatggttaattcagcgttcaccgcattacgctcacgttcggcatatttcttgtcgagcaaaggttcagcaatagcatcggccaggcggtctaccgcaccaggcaaggcgtcgttctcaacttccagatagaaagccgtgcgatacggcgcagtgctggcattgtgactaccgccgtgcattttgagatattcggccagactgtcagcctgcgggtactttttcgaccccatcagactcatatgttcaaggtaatgtgccagcccctggtacgcctcgggatcttccagcgacccaacgggcaccaccagcgccgagagcgatttaactgcctgcggatcagaaaccagcaagaccaccataccgttatccagacgtatagcctgatactggcggttatctttatcacttttacggatggtttcctgaatcggctgccatcccgtttctgcctgacttaagggtgcccaaagggcaactaacaacaataatgctttgaaccaggtgctgcggggcattctcggacctcataatcaacttaattttctgtccagattcaacacgttaacgcaaatcatctgccagaatttaatcttgtgctgcacgagtcagcctatgtttatataaccatcagtccgtgactggtgcgcatcataaagtaagcggatagattgcgcaatttttatacagcactcatgactgattaaagcgaaacagcggtaacaggaaacgttgcgactgttcaacgatggcctccattgtctctggtgttaattgccgccagagcctttgataccagatatcatcaccttcgccacgcaccatcatgttgccttcgtaagcctgaaggaatttcgtacgggctttttgcaacgtggaatcgtcatccagcatggcatcgttttgcgcgtcataacaggtttttagccacgcgccgccactttcaggtaacaccagcaatggcgcggacatcccttcacgatacccctcaatcagttgtgagaggtaatgcaaagcctgttcggctgcaagcggcggaaaacgccactcgccgtctttgcgtagaaaaaggcgactttcaccattaccaccgctggcacagtagacaaggtgttccagccaaagttgcattccctgcgccacacttaataaagagggacgccagcgcaacaggccatccggctgcacctgcggcaaccagccagttatctgcacaccgttgcaggcgagatcaatttccatactctgccccggctggcgacaggcaatgactctgtcggcaagctgctgcatctcctggcactgagtttcccagaaaatttcaccaaaagcgccatacggtaaatcccctgccgcccggaagcgacggaacaagcgttcggcatcatcctgctcaaccagtgcattcaataactgctgattgatttgataacggctaagcccttccagaataaatggctcggtgtcggggatttcgctgtcttcagtacggaagttcacctgcaaacgcatctggaagaacgcccgcaccggatgtgcccagaatcgttgtagcgtttccagcggcacggtttccggtaaggtaaacggcagcggctgaacaaattcagaatgtgctttaccagcctggctggccgcaggtagccattcacgagcatagctttgtcgttcgcctggctgatagttttgtggatcaaacggcattcgggtatggaggcaagtaagatgcgcttttacccttgcctcgctttcatcacagttgagcgcttcatcgcccggtagataatgactttgcccgatgtagtcgatcagttcctgcaccagtaccgacgggaaacgttcactgttatcctgaatggaacgcccgatatagctgatatagagtttttgctgcgcggaaattaacgcttccaggaacagatagcggtcgtcatcgcgacggctacggtcgccacgcttcggtttctggctcatcaggtcaaagcccaatggcgcaagctgacgtggataaacgccgtcgttcattcccagcaggcaaaccactttgaacggaattgaacgcattggcatcagagtacaaatgttaaccggtccggcgagaaaacgctggctgatacgttcttgatccagacgctgtgccagttcatcacgcaatagtgacagcggcaccgcgtcgccatactgcgcacctaaaccttcggcgataatcgcctgccattgttgttcgatcagcgtcatcgccgcttcggtttccgcatccggcaggaagaaggcgctgagcatatcgcgacaaaccggcaaccactcttctagcggacgctcctgtgccagcccgcgacgccagatgtttagctgcattagcagtgaagccagatgccccaccagttctgcaattaagccgctcgattcatcataaggtagaaccgattgccactcgccctgcgcgctctccatcgcgtagcccagcaacatacgcgtcaggccaaatcgccaggtgtgttgtccggtggcggggagttccagctcgcgaacgttgtcgtcatctatcccccaacgaatgccggattcgttgacccactggcgtaaataacgcagcccttcttcggtgatgtcaaaccgcgccgccagcaccggcacatccagtaatgccagcacgtcttccgacacaaagcggctgtctggcaacgataacaggctgataaacgcttccagtaccggatgcgactgccgcgcccgacggtcggaaatggcgtaaggcaggtaacgatccgcaggtgcgctaccaaacacagcccgaataaacggactgtagctgtcgatatcagccaccatcacgatgatgtcgcgcggagtaagtgtcgggtcttcttccagcatcgccagcaggcgatcgtgcaaaacttcaacttcacgctgcgggctatggcaaacgtggaaggtgatactgctatccagtggatcaagcgggcgtttgttatcgctacgggaaaactcttcgatgttcacaccagcaacggcacggttttccagttccagaatgtcagactgaatgttatgcagcaggttatctggcgtgacatcgacaaaggcgtccagctcctggctgctctccaggtcagaaaggagataaatgtagtcgcgcccaagcttaccccatgaagccagcagcgggttgccgacatcctgttcaccatcgctgttaaagagctgcccggcattttcgctatcacgaaatagcggcaattcgcgatcttcaaaactgtgtcgacgctgacgggtcagcagtttcgccagataagcaggatctttaatatcgccccagtaataacggcaggggttggtaaacaggagatggatttcaatatgtttacccagcgcctgtagcgcctggagataaacaggcggtaacgcggaaataccgcatataaagacgcgcgaaggtaaccccggcgggcaggtcgtcgcggactccagcgtttcgataaagcgctgatagagattggcgcggtgccagcgcggttgcccgagttgatgggtatattccaccagcgccttccacaacggggcttgccaggcctgtgcttctcccagcccttcaaccaaatgtcctgtttcccactgtgccagccagtccggacgatagaccagatactggtcaaacaggtccgccgcttttgaggaaagctggaacagttttcgcttgtcgctatcgtcagtcagataatgccgcaacagggtaaagtcttcgcgctccagcaattgcggcagcagagtcatcagtttccagctcatgctctgtttgttaaaggcgctctctttggggatttccggtaacacccggacgaacatatcccagataaagctcgctggcagcggaaaatcaatgtttgccgcaatactaaacttttgcgacagggtcatttgcagccactgcgccataccggtactttgcaccagaatcatctctggttcgaaaggatcgtccagccgttcgcgttcgacaataaactccatcaacgcttccagcacgtccagacgattggaatggtagacccttaacatagcggctcctgactactgacgattcgggcaatgcaggcgggtcatctcgccttctctgcccccgggtgaaactagcgtaacgctgatgctgacacatcccgcctgcgatgtctgcattcggttgacctgccagttggcaggtggcgaaatcgcgcgcagttgcgtttgctgccaaccatgccgccagagctgttggtactggtttctgctggcgagactgttcattaatgttcgctggatacccgataacgcagtgacaatcatcaccatcagcaccatcgcaaccattacctccggcaggctaaagccttgttgattcttcagggaagctgacataacgccctctctttcagcggacaaaaatcgctccagccgcgtggcgaaaaaacaatgtttccatcaatgacttcgcctgttcgccacaacgaaacgccttcataaccggcaaccaataaggcttcattatctgccagtaaacgcaaacaaacccgggcatcggttccagcgtactgcgagcactgaactgcgggctgcgtctgccaggagtgcattttcccccacgccagcgccgactgaacgatggcctggcggcgcaatgactgactttctatgctcacgcgagaggcaaaactgcgatcctgctgactcattccttgcaatagcaagctacccaaaaccagcagcatcaggaccagagccagtgacgaaacacctttttcgcggttcacaggttgaatcctgtcacgctatagctggcatccaccacggtttgcggttcagacttactggcagcacgcatattaaccgtcaacaccggcgagaagccgctgacatcctgacgtacgacctgaaaagtgtcgataatgatggcatccggattagtgactttatcccagcccttaccttcacaggatgtcgcaccgcgtagcgtttccagcacatgctccttcagacgaaatccaatctggtcagactcttttaccggttcgcgatcccagataccgttactgttcgcatcccactgcacaatgatacagtcaccctgtccgacaatttccagcccttcgccggtacagctgccatgacaataacccgccctctggagatgcttcgcgacggtaaatacccgcagccagatttcatcttccagcgccagcttacgggtgctcgttaaactttcacgctgtaacgcaggcagaaagcgtgcagcccccagcaacaatacgctactgatcgccatagcaatcaacacttccagcagagaaaaaccttgctcttttacaggcatccttctgtttctccttgctgacaaagccggagtcttccccacggcgaaaccaccagccaccactcgcccgttgagtttttgaagcgaatatgcccggcccatgcggtattgcgcaggccaaagaaagcaagcgaaggtgtcaggtcgctcatttagacttcgggccagcgtggcacaaagaccaatggtgaactgccatgacaggtattggccccagcagcggaactcacaaggcaccataacgtcccctccctgataacgctgatactgtggtcgcggttatgccagttggcatcttcacgtaaatagagcaaatagtcccgcgcctggctggcggtttgccatagccgttgcgactgctgccagtattgccagccatagagtccacttgcgcttagcatgaccaaaatcagcatcgcgaccagcgtttcaatcagcgtataaccacgttgtgttttcatgccggcagtatggagcgaggagaaaaaaagacgagggccagtttctatttcttcggcgcatcttccggactatttacgccgttgcaggacgttgcaaaatttcgggaaggcgtctcgaagaatttaacggagggtaaaaaaaaccgacgcacactggcgtcggctctggcaggatgtttcgtaattagatagccaccggcgctttaatgcccggatgtggatcgtagccttcaatctcaaagtcttcgaaacggtagtcgaagatggattcgggtttacgtttgataatcaacttcggcagcggacgcggttcgcggcttaattgcagatgagtttgatccatatgattgctgtacaggtgcgtatcgccaccggtccagacaaaatcacccacttccagatcgcactgctgcgccatcatatgcaccagtaacgcgtagctggcaatgttgaacggcaggccgaggaagacgtcacaggagcgctgataaagctggcaagagagtttgccgtctgccacatagaactggaagaatgcatggcacggtgccagcgccattttatccagttcgcctacgttccacgctgaaacaataatgcgacgggaatccgggtcgtttttcagctggttcagtaccgtagtgatctggtcaatatgacgaccatctggcgttggccaggcgcgccactgtttaccatacactggtccgaggtcgccgttttcatcggcccattcgtcccagatggtgacattgttttcgtgtagataagcaatgttagtgtcgccctgcagaaaccacagcagttcgtggatgatggaacgcaggtggcaacgtttagttgtcaccagcgggaatccatcctgcaggttaaaacgcatctgatgaccaaaaatggaaagcgttccggttccggtacggtcgtttttctgtgtgccttcgtcgagcactttttgcatcagttctaaatactgtttcatggttcctcaggaaacgtgttgctgtgggctgcgacgatatgcccagaccatcatgatcacacccgcgacaatcatcgggatggaaagaatttgccccatgctgatgtactgcacccaggcaccggtaaactgcgcgtcgggctggcggaaaaactcaacaatgatgcgaaacgcgccgtagccaatcaggaacaagccagagacagctcccattgggcgcggtttacgaatatacaggttgaggataataaacagcaccacaccttccagcagcagctcgtaaagctgtgatgggtggcgcggcagcacaccgtaagtgtcgaaaatggattgccactgcgggttggtttgcagcagcaaaatatcttctgtacgggagcctgggaacagcatggcaaacgggaagttcgggtcaacgcggccccacaattcaccgttaataaagttgcccagacgcccggcaccaagaccaaacggaatgagtggtgcgataaaatcagaaacctggaagaaggaacgtttagtacggcgggcaaagataatcatcaccacgataacgccaatcaggccgccgtggaaagacatgccgccgtcccagacacggaacagatacagcggatcggccataaactgcgggaaattgtagaacagaacataaccaatacgtcccccgaggaagacgccgaggaagcccgcatagagtaagttttcaacttcatttttggtccagccgctgcccggacgattcgcccgtcgtgttgccagccacattgcaaaaatgaaacccaccagatacatcaggccgtaccagtgaagcgccacgggtcctattgagaaaatgaccggatcaaactccggaaaatgcagatagctactggtcatctgtcaccacaagttcttgttatttcgctgaaagagaacagcgattgaaatgcgcgccgcaggtttcaggcgctccaaaggtgcgaataatagcacaaggggacctggctggttgccggataccgttaaaagatatgtatatgatccgcgctataaccctccgcgaatcagcccgcccatgccgcgacgctccataaaggctgcaacctgatggcgaacttcggtcgccagttgcgcttccagactacgctgcgcaagattttctgcttcggcataatcaatgcgccgcagcaggtattttacccgcgctacagaacgtccgttcatagacagatggcgatacccaagcccaatgaggattgccacgcacatgggatcgcccgccatttcaccgcacaaacggagatcgattccatgtatttccgcttcccgggcgatcatcgccagagctcgtaacattgcaggatgaagactgtcataaatgttcgccacccgggtattgttgcgatcaacggccagaatgtattgagtcagatcgttggtgccaacagagatgaaatcgacccgctttgccagatgcggcagcataaataccattgacggcacttccagcatgatgccgatacgtggtttgggaatttcgtaaccgatcatctcctcgacttcacgtccggcacgttcaatcaggcggcgtgcttcatcaacttcatcgaggcttgtgaccatcggcaacagaatattcaggttgcccgtagcggcattagcacgcagcatcgcccgcacctggatcaagaagatctccggctgatcgagcgtaatgcgaatcccacgccaacccaggcatggattctcttcgctgatcggcatgtaaggcagctgcttatctgctccgacatccagcgtacgcaaggtgacgggtttatcattgaacatttgcagcatcccctgatactgcgccacctgttcttcttccgacgggaaaccactttgcagcatgaatgggatttcagtgcgataaagaccgatgccatcaatacggctgcccagtttttcttcatgttccgggcttaaaccagcattgagcatgacttttatacgctcaccgctttttaactgcgcgggtaaattgacgtcatcttccgccagacggctaagctcaatctcttcactaattagccgctgatattcttgcagcagtaccggctccggatcgaccagcaattcaccgcgatagccatcaacgatcagcgtcctacgatgcagcaccgaaggctgaatatccgcgcccatcacggtagggatccccagcgcacgtaccatgatcgcagcatgggagttggctgcgccatctcgcacgacaacaccgactaagcgatcctggggcagctcagcaagagttgtcgctgacagttcatctgccaccagaatgaaacgttccggccaggcgttcggcccttgattagcgtcatcaagatgaaacagcaatcgctgacccagcgcacgtaaatcgccagcccgctctttgagatagttatcgcttagcgcggcaaactgttcggcaaatttttcaatgaccgtttttaccgcccactctgccaccgagcctttatcaacctcggcaaacaattcgcgacgcagccgggtgtccgaaagtaggtgcgagtaaagatcgaaaatagccgccgtttctttttgtgctccggcggcaaagcgtttgctgtagcggcgaaactcgtttgccgcttcttccagcgccccggtcagtcgttcgcgttccagagccggatccagcgttgatgcctgatacacctgttccattaaaggtaacgtggcatcctgccagccttcggcaatcgccacaccaggtgctgccggtaatgcgcggattcgcgtctggcgatattgcccaaacaaggcagtcaactgcgactgagaaagaatagctgccatctgggtggcaagcgtcaccaggaaggattcttcactttcgtcatactggcgcaactctcgttgctgtaccaccagtacaccaagcaactggcgacgttgaataattggtacgcctaaaaacgcgcggaaacgttcttcttttacggaggggatgtatttgaagctggggtgcttttgcgcatctgcaaggtttatcggttccgccagcctgccaaccaggccgacgatcccttcatcaaacgcgagcgttacagtgcgaccgcgtggttttttcagcccccgggtcgccatcaggtagtaacaacgtcgatcatgatcggccaggtagaccgaacagacctcggtatccatcgcaagacagatgtcggtaaccagaatatttaacgcctcattcaggcgtggtgcgctggctaccttttcgactatttcgcgcaggcgagtgagcataattggcgtgacttaacctcttttacgtcgataagcagatgtgttttgtggttttggcgtattttcctgcagtgacatcaccacactcgcgaactctttcattaccctacggtagacatcacgtttaaatgacaccacctgtctgaccggataccagtaacttacccatcgccagccgtcaaactctggtgtactgctggtttgcatattgatttctgcatcgccgctcaccagctgcaagagaaaccatttttgtttttggccgatacaaaccggcttcgtgtcccaacgcaccaaacgtttcggtaatttgtagcgcaaccagttacgcgttgaagcaaggattcgaacgtctttgcggcttaatcctacttcttcaaacaattcacggtacatcgcctgctctgcggattctccggggttgattccgccttgcggaaattgccaggagtgctgaccaaatcgccgggcccacattacctgcccctggcgattacaaatcacgatacctacgtttgggcggtagccatcgtcatcaatcaccggactacctcaaaataaagctttatatacgaatgattgtttcatactccaagaagacggtaaaccactctctgcagggcattacacactaataacaattgaataactcacagttatgtgcagagttataaacagaggaaggggtggatagccgtttttattcaccttttctgtggatagagttgtgaagaactacggaattactacgggaaaacccggagcattctgaataagcccgatatagacattttaaaatattcattattagtcaatgcattacatgtaatttgagtaatgaaaaagagtaattcgtgacccaggtcacacctctcatttacgggttggcgaaagatcaaccaatgccgtatttatccacagaatgtgccactaagttaagcactgaaccactaaaaactggagtttcgtcgcacgtcaaggctgtaaatggaaacagtagtggaggtttttcacagttatcccagctttctgtggataacatggtgtaagatcctgtttattttcagtgaccagatttggaaaacctattgcagtgttgcgcaactcgattaccggcagcctaaaaagcaatataaatcagagaattgaacaacacatgtggaaaaagttacactgcgaatattcggcacataattgctgtttgttttttaaccaaggtatcatgacatgtcccaacctcgcccactcctctctcctcccgaaactgaagaacagttgttagcgcaagcacagcaactttctggttatacattgggagaactggcggcacttgccgggctggttacgccagagaatttaaaacgcgataagggctggattggcgtgttactggagatctggctaggtgccagcgcagggagtaaacctgagcaagattttgctgctctgggcgtggaacttaaaactatccctgtggatagtcttggtcgtccgctggaaacaacattcgtttgtgttgccccgttaacgggtaatagcggggtgacctgggaaaccagccatgtgcgccacaagctcaaacgcgtactgtggataccggttgaaggtgagcgcagcatcccgctggcgcagcgtcgcgtaggatcaccgttgctgtggagcccgaatgaagaggaagaccgacagctacgcgaagactgggaagaattaatggatatgattgttctcggtcaggttgagcggatcaccgctcgtcacggggagtatttacagatacgaccgaaagcagcgaatgcgaaagcgcttaccgaagccattggtgcccggggcgaacggattctgacgctgccacgcggcttttatttgaagaagaatttcaccagtgcactactggcccgtcattttctgatccagtagccatcgctttgacctgccgctttccgggcatataattaccgcttcatttttttggcagggctttttagatgttatttgcatggataaccgatcctaacgcctggcttgcgctcggtacgctgacgctgctggagatcgttcttgggatcgacaatattattttcctttctctggtggtggcaaagctccccacagcacaacgtgctcatgcgcgccgtctggggttggcgggagccatggttatgcgtctggcgctgctggcatcaatcgcctgggttacgcgcctgacaaatccgctttttacaatattcagtcaggaaatttccgcccgtgatttgattctgcttctgggtggcttgttccttatctggaaagccagcaaggaaatccacgaatccattgaaggtgaagaagaagggctgaaaacacgcgtttcatcattcctcggcgctatcgtgcagattatgctgctggatattatcttcagcctcgactcggtgattaccgctgtgggtctgtcagatcacctgtttattatgatggccgccgtggtgattgccgtaggcgtgatgatgttcgccgcgcgctcgattggtgattttgtcgaacgccatccttcggtaaaaatgctggcgctctctttcctgattctggtcggctttaccctgattctggaaagtttcgacatccacgtaccgaaaggttacatctacttcgcgatgttcttctctattgcggttgaaagcctcaacctgattcgcaacaaaaagaacccgctctgatactccgtacgctctcctgcgggagggcgtactcactcctgttaccctcacagtttaagattttcctgctttcaagatatataacgtcggtttataaacagactattatcataggtgggccaaatgaggataaccggatgaaaaaatgggcagtaataatttctgcagtcggactggcgtttgctgtttccgggtgttccagtgattacgtcatggcgaccaaagatggccgtatgattttgaccgatggaaaacctgaaattgatgatgataccgggctggtgagttatcacgatcagcaaggtaacgcgatgcaaattaaccgtgatgatgtttcgcaaattattgaacgttaacaaataaggtcagcatccggctgtaatgccgatcagttaaggatcagtttgaggtgtactggcaatagcggacactaccatttgttctttttttaagcagccatctgatgatatttttccctgaaggctgccggggagatattccccagacgagagtgacgacgctgacgattgtagaaaatctcaatgtattcccgtattactgagatggcttcatcccggttattaaaacgatagtggctcaggctctcatttttcagcgttccccagaagctttccatcggagcgttgtcgtaacagttacctttacgcgacattgatgttttcagaccagactgctcctgtatgacccggtaatcgtatgcgcagtactgtgaacctcgatcagagtggtggattagcccggcaggtgggcgctggctcctgagcgccataaacagggctttacctgtcagctcttttgtcatgcgctctcccatggcgtagccgacaatttcgcacgtataaacatctttgatgccagcgaggtacaaccatccctcctgtgtggcaacatacgtcaggtccgccacccagacctgatttggtgctgtaggagcgaacgtctggttcagcagatttggcgcaactggcagattgtggttcgagttcgtagtcgctctgaacttgcgtttctgcttacagcgtagccttagctccttacgaagacgtgccagtcggtcacgaccaacgatgatgccattctctgccagctccgtctggagccgccgggttccatatgtttcgcgagtgcggatatgtgccaccttaatctccagttttagccgctcatcactttgttttctgtctgagggttcatgctgtacccagttgtaataaccgctcctggatacaccaaatacctgacacatcgcttcaatgggaaattgttgtcgccattgttcgattaacgcgtatttttcagcgactcctgtgcaaaatacgctgttgctttttttaatatatctcgctcaaggcgagcttcatttaacgccttacgcagttgcagaatttcagattccagttcagccaccgtgcgggaaccaggagtaccgagcccttttctggcggcggtaacccattgtcctaaagtgccttcaggaagagataatcgggaagcgccttcactgatcgaaagttgattttcaagaaccgttctgacagcttcggctttgaactctttagagtaacgttgggtttttctgctcattattagctccttctgatgccattctatttcaggaaggagtgtccgttaaactcaggctacctcagttgaccgatccagtggctgtgtaagaatccggaaacgctcacttgtttccggatttttttatgcacattggacaggctcttgatctggtatcccgttacgattctctgcgtaacccactgacttctctgggggattacctcgaccccgaactcatctctcgttgccttgccgaatcaggtactgtaacgctacgcaagcgccgtcttcccctcgaaatgatggtctggtgtattgttggcatggcgcttgagcgtaaagaacctcttcaccagattgtgaatcgcctggacatcatgctgccgggcaatcgccccttcgttgcccccagtgccgttattcaggcccgccagcgcctgggaagtgaggctgtccgccgcgtgttcacgaaaacagcgcagctctggcataacgccacgccgcatccgcactggtgcggcctgaccctgctggccatcgatggtgtgttctggcgcacaccggatacaccagagaacgatgcagccttcccccgccagacacatgccgggaacccggcgctctacccgcaggtcaaaatggtctgccagatggaactgaccagccatctgctgacggctgcagccttcggcacgatgaagaacagcgaaaatgagcttgctgagcaacttatagaacaaaccggcgataacactctgacgttaatggataaaggttattactcactgggactgttaaatgcctggagcctggcgggagaacaccgccactggatgatacctctcagaaagggagcgcaatatgaagagctcagaaaactgggtaaaggcgatcatctggtgaagctgaaaaccagcccgcaggcacgaaaaaagtggccgggactgggaaatgaagtgacagcccgcctgctgaccgtgacgcgcaaaggaaaagtctgccatctgctgacgtcgatgacggacgccatgcgcttccccggaggagaaatggcggatctgtacagtcatcgctgggaaatcgaactgggatacagggagataaaacagacgatgcaactgagcaggctgacgctgagaagtaaaaagccggagcttgtggagcaagagctgtggggtgtcttactggcttataatctggtgagatatcagatgattaaaatggcggaacatctgaaaggttactggccgaatcaactgagtttctcagaatcatgcggaatggtgatgagaatgctgatgacattgcagggcgcttcaccgggacgtataccggagctgatgcgcgatcttgcaagtatgggacaacttgtgaaattaccgacgagaagggaaagggccttcccgagagtggtaaaggagaggccctggaaataccccacagccccgaaaaagagccagtcagttgcttaactgactggcattacagcatccggctggccttaagatttttctctttcccttttcccttccctctgccatttttatattccttatgtcgtgattataaaaaggaaacggctatgcaatatcaccgtataccccacagttcgctggaagtcagcacgctggggcttggcacgatgacgtttggtgaacagaacagcgaagccgacgcccacgcacaactcgactatgccgtcgctcagggcattaaccttatcgacgttgccgaaatgtacccagtacctccgcgccccgaaacgcaagggttaaccgaaacctacgtcggcaactggctggcgaaacatggcagccgcgaaaagttaattatcgcctccaaagtgagcggaccgtcgcgcaataatgacaagggcatccgcccggatcaggcgctggatcggaagaatatccgcgaagcgctgcatgacagcctcaagcgcctacacactgattacctcgatctttatcaggtgcactggccgcagcgcccgaccaactgcttcggcaaactcggttatagctggacggattctgcgcctgcggtttcgctgctggatacgctggacgcactggcagagtaccaacgcgcgggaaaaattcgttatatcggcgtgtcgaacgaaactgcatttggcgtaatgcgctacctgcatctggcggacaaacacgatctgccgcgtattgtcaccattcagaacccttacagtctgttaaaccgcagttttgaagtaggtctggcagaagtaagccagtatgaaggggtcgaactgctggcctattcgtgcctgggtttcggcacgctgaccgggaaatatctcaatggtgcaaaacccgctggcgcacgtaatacgctctttagtcggttcacccgctatagcggtgagcaaacgcaaaaagccgtcgcggcgtatgttgatatcgccagacgtcatggcctagaccctgctcagatggcgctcgcgtttgtacgccgtcaaccgtttgttgccagcactctgctgggcgcaaccacgatggatcagctgaaaactaacatcgaaagtttgcatctggagttaagcgaagacgtattagctgaaattgaagcggtgcatcaggtttatacttatccggcaccataagattaacgccggttaaaaccggcgttaaatattaatgacggcgctgccagatccacagcgccgttattgccagcgcaaacagcgcaccgaagccaatgccaatgggcacgaccgggatgcctaccattaccgccagcgagtaaatgcccagcatcaacaacatggcgctgttttcgccaaggttttgtactgcaatcgcattccccgccccgacgctttttttaccccgctcctgtagcaacgcattgagcggaacgacaaaaaagccccccatcacgccaatcagcatcaacaaggcataggctggcagcagctcgtgttgcagggaaaaaatcagtaccaccacgccaatcaaaatcccggctggcatacagcgtgacacggtttccagcgtaactaacttcgctgccgcacctgcgccaaccacgataccaatcgctaccatcgcgttgagataggtgggcgtagcgttatcggtaatgcccagcgccaccggtacccacagcaccaacaggaaacgcagcgtgacacccgctccccagaataaactggtgcccaccagcgaaaaacgcgtttcaccattgcgccatagcgaggtgcaggcattcaggaaactgcgggtcatgttgatgagattccaggactgccccggacgcgccgccgccagtttgggaatgtagatattggcaacgaccgcaccaccgtaggccagtgcgcatgcggccagggcgacgaggacatgccagtcagccagcacaccaccggctacggaaccgagcaaaatcgccgctatggtagaagcttccattaaaccgttagctttcactaacttactacccgtggttaattcgccgagaataccgtatttcgccggtgaataggctgcagcaccaacacccaccagcgtatagccgagaaacggattgataccaaagcagatactggctgcgcccagcagcttcaggccgttggcaaacatcatcacccggcctttggcgaagctatccgccacctgcccgacaaacggcgcaaaaagaatgtaagcacctacaaacaccatttgcaggatgggctggctccactccggatagaactgcgctttcagtaacgccagagtggcaaacagtagggcattatcgccaaacgcagagagaaactgcgccacgataaccgctttcatccccttcgaccacaacgaagtgttagtgtgcactgactcactcatcgtgttgttccgcttcgtctacccagcttttcaacgtgacaaagtcaggtttgccgctgccaagtaatggcatctgtttcagatagcgaatatcgcgcggtacagcaagctccggcacgccgtgctcgcgggcatactgttgcaacttatcgcgcgtcagttcgttatctgtggtgaaaagcaccagtgcctcgcctttgctggcatcgctcttaatcgcagtggcatggactttatctggcgaaacaccaagtgccagttgttccaccatttccagcgacaccatttcgcctgcaattttggcaaagcgttttgcgcggccctgaatctgcacaaagccctgctcgtcaaaacgcacaatatcgccagtgtcataccagccgcgctccatttcgccgcgaacattctcggcggtgggcacttccagtacacctggcttctccacccgcagatagccgttcattatgttcggccctttcagttgcaggcgtccgccctcttcgataccagggaccgacaacaggcgcgcatccattcctggtagaatacgccctaccgtaccgggtttcgccgccatcggtacgttgatagaaacgacaggcgcgcattcggtcacgccgtagccttcaaggatgcgcaggccaaatttatcctgccaaagctgtttggtactttcttgtaatttttctgcgcctgccaccacatagcgtagacgatagaagtcatacgggttggcgaaacgcgcgtagtgaccgaggaaagtcgaggtgccgaacaacacggtgcaactgcggtcatacaccaactccggcacaatacggtaatgcagcgggcttggataaagaaacacttctgcacctgtgagcagtggcgtaaacaggcctaccgtcagcccaaaggagtgaaacagcggtaacgccgacataaagcgatcgttggtggtgaagtcggcaatcgttttaatctgctcgacgttcgccagaatgcttttatggctatggacgacgcctttcggatggccttcagaaccggaggtaaagaggatcagcgcctcttcttccggctgctgttttacctgtgccagacgtggcatcagcagatgcgcgaagatccatactttgtcggcagtggtgacatctgcttttaaatcttccagatagacccagcgcacctgagtaagttgctccggcagatgccagagtttgcctttatcgagaaactggcgggaagtgaagatggttttgatttcagccgccgtaatagcactggtcagcccttttaccccggcagtgtagttcatcattgcgggaatgcggcgacgggcgatggccccaaaaatcactgccgcactgatgcctgcattgggcagcattaagccgatgcgttcgccttcaacactgtatttttcaaggatgcgtccaacaaacagcgttttcgtaagcaatttgcgataggagtctggggtaaagttgacgtcttcgacacatttcttcccggctccgaagcggtacattgcactcagtaaagattcgtacagcgtttcacgcgggcgcaccgccattcgcgcttccatcattatttgatgcagcatttcgccagcgattttgcgacggtcacgggcacgcggcgcatccggcatctccacctgcgttggtggcaaaatatgcagagtaatttgcgggaacaagcgacgtttaaccagacctttcaggcggctgaagtgcgtaagttccgccccttcaatacgcacaggaataaccgttgcaccagacttcgccgcgacaaaacccgcgccatcgtagattttcatcagcgagcctgtggtggtgatgcgtccttcagggaaaatcaccactggtcggccctgttccaccagacgtaccagatgtttaatcgccataggttgcgtcgggtcgagaggaacaaagtcgataaatgatttcagccaacgcatataccactgttggcttattgaggtgtaaacggcaaacactggacgcacaggtaaaaacagtccaagcaaaatgccatcaataaaagagacgtgattaggcgtaattagaacgcgctcgcccttcagtgcctgggtgtcacccgtaacgcgaacgcgatacaaaacacggcacaaatttcgaaaaaagctaaaaagcattccaactccctttgctctgattcagtaaaagcgaatggagggagattacacgagataaagaacgcgagcgacagtaaattaggtgcgaaaaaaaacctgcgcatccgcgcaggttggtgcaagagacagggtacgaagagcgtaccgaataatctcaccaatcaatacctctgggatcttgattgtggtctgcacgacgactcttcgccagcgagaaaacgcaaaggaatgaagggaaatgcaacgaggtgtgtaaattgtcggttactgttacagattgatgaccggcaaaaaaaaacctgcgcatctgcgcaggctggtgtaattcatgtgctcaacccgaagttgacttcacctatcaatacctctgggatcaccactttagcaacctgaagccaaacgccaccagcagtcaatcgcaacagcatttcgcaaagtgtaaccaaaggtttgcaatctctttttttgtcttacttatttgcgtttggctcacattcccacgatgaaaacacgccgccccttgaaccaacgggcgttttccgtaacactgaaacaatgtaagcgtttacccactaaggtattttcatggcgaccataaaggatgtagcccgactggcaggcgtttcagtcgccaccgtttcccgcgtcattaataattcacccaaagccagcgaagcgtcccggctggctgtgcatagtgcaatggagtctcttagctatcacccgaacgccaacgcccgtgcgctggcgcagcagaccactgaaacggtcggtctggtcgttggtgatgtttccgatccgtttttcggtgcaatggtgaaagcggtcgaacaggtggcttatcacaccggtaattttttattgattggcaatggttaccacaacgaacaaaaagagcgtcaggccattgagcaactgatccgccatcgctgtgctgcgttggtcgtccatgccaaaatgatcccggatgccgatttagcctcattaatgaaacaaatgcccggtatggtgctgatcaaccgtatcctgcctggcttcgaaaaccgttgtattgctctggacgatcgttacggtgcctggctggctacgcgtcatttaattcaacaaggtcatacccgcattggttatctgtgctctaaccactctatttctgacgccgaagatcgtctgcaagggtattacgatgcccttgctgaaagtggtattgcggccaatgaccggctggtgacatttggtgaaccagacgaaagcggcggcgaacaggcaatgaccgagcttttgggacgaggaagaaatttcactgcggtagcctgttataacgattcaatggcggcgggtgcgatgggcgttctcaatgataatggtattgatgtaccgggtgagatttcgttaattggctttgatgatgtgctggtgtcacgctatgtgcgtccgcgcctgaccaccgtgcgttacccaatcgtgacaatggcgacccaggctgccgaactggctttggcgctggcggataatcgccctctcccggaaatcactaatgtctttagtccgacgctggtacgtcgtcattcagtgtcaactccgtcgctggaggcaagtcatcatgcaaccagcgactaaccgcagttaaagcaattccagcgccagtaattcttcgatggtctggcgacggcgaatcaaccgcgcctgaccattatcaaacagaacttctggtaacagcggacggctgttgtagttggatgacattgatgcgccatatgcccctgtatcatgcagtaccagataatcacccgccttcacttccggcaaggcgcgggtttcaacatttcccccttcctgctgggtaaagacatcgcccgattcacataatggcccggcgacgacggtttccaccgttggcgcgtgttccagagaacgaccatcagctgccagggcactgatatggtggtaactaccgtacattgccgggcgcatcagatcgttgaacccggcatcaaccagcacaaagtggcggctacccatttgtttgacgctccgcacctgagtaattaacacgccagactgcgctaccagaaagcgacccggttcaatttccagtttcacagggtggcccaaatggcgagcgatttgctcacgcgcggcattccacagaccataataatgttcggtatcaaccgcctcttcaccctgttgataaggaatagaaagcccaccgcccgcagaaatagcctgtaaatcctgaccgaattcgatgacctgacgtaccatagcaccacacacctgttccagatgggcataatcaacgccagaaccaatgtgcatgtgaatgccgaccagctgcagatgatgacgttgtatcacgtccagtgcggcgggcagatcggtgtaccagataccgtgcttgctgttttcgccaccggtattggttttttggctatgtccgtgaccaaaccccgggttaacgcgcagccatacccgatgccctggcgaaacctggcccagttggtcgagcatatcaacagaacccgcattcaccggaatttgcaattcactgacgcgttcaagcgtcgcctgatcgataacatctgccgtaaaaacaatatcatcggggtgcgtttgcggattgtaacccgccgccaacgcacgctctatttcgcctaacgagacggaatccactttcacgccctgctcacgcattaatcgcaaaatatgaatattggaacaggctttctgtgcaaagcgcaccacatcaaactgtttcagcgctgcaatctgccgacgaataatttgcgcatcgtagacccacaccgggcagccaaattcagcgggcaaacgcagcagattttcggcggtgagatcggtatcggtgctgaacagtgaatgtggcataacaaactccagatgagtgcttttttatgattacgccacatcataaaaagaataaaaaatatcgatttatgtcgagtctatgcaaaaatgatatagattaccggattgcgagagagcgctaatggccgccgttaacttacgtcatattgaaatttttcatgcggtaatgaccgccggaagcctgactgaggcagcacacctgctacacacctcacagccaaccgtcagccgcgaactggcgcgctttgagaaggtgatcgggctaaaattgtttgagcgcgtacgtggacgattacatcctaccgtgcaaggactgcgtctgtttgaagaagtgcaacgatcctggtacggactggatcgcattgtcagcgccgcagaaagtctgcgcgagtttcgccagggagaactgtctattgcctgcctgccggtcttttcgcaatcttttttaccgcagctcctgcaaccctttctggcacgttatcccgatgtcagcttaaatatcgtgccccaggaatcaccgctacttgaagagtggctctcggcccagcgtcatgatttaggactcactgagacactccatacgcctgcgggaacagaacgtaccgaattactctctttagatgaagtgtgtgtgttacctccgggtcatccgctggcggtaaaaaaggtattaacgccggatgattttcagggtgagaactacatcagcctttcccgtactgacagctatcgccagttgctggatcagctatttactgaacatcaggttaaacgacgcatgatcgtagaaacccacagcgccgcgtcagtctgcgcaatggtacgggcgggggtaggtgtttcggtggttaacccactcaccgcactggattatgcggcaagcggtttagtggtacggcggttcagtattgcggttccgttcaccgtcagcctgatccgccccctgcaccgcccgtcatcagcgctggttcaggcgtttagtgagcatttacaagcggggttaccgaaactggtcacttctcttgacgcgattttgtcgtcagctacgacagcataaaagcgacagcatcctcggcatggatcgccgcagtatcaaacacaggcaaaacactgcgctcttctggaaccaataaaccaatttctgtgcagccaaaaatgacaccctgcgccccctgttctgcaaggcgagcaatcacttgcgcataataagcgcgtgacgcttcggtaaattgccccagacacagttcttcaaaaataatctgattaatcttcgcccgttcatccgcttccggaataagacaattgatggaaaattgttccgtcagccgcccgcgataaaaatcctgttccatggtgtaacgcgtacccagcagcgccacacgagtcattccggccccggtaattgcacgtccggtggcatccgcaatgtgtaagaaaggcagagtgcaacgtgactcaatggcatccgccactttatgcatcgtattggtacataacacaataccttctgcgcccgcccgctgtaagccaagcgccgcctcagccagaatgtccccggttttatcccattccccgcgacgctggcactcttctatttcatgaaaatcgacgctatgtagcagcacttgcgcagagtgaagcccaccaagccgctgtttaatgccttcatttatcagacgatagtaaggaatggtggattcccagctcattcctcccagcaaaccaattgttttcattcctctctctcctgatgtgtgttaccgcaacaaggctgaataaggaacgagacaaacgcctcaacggccaggtgcccaatctctattaacgaaaaaagggccggatgtacagcacatccggcccgtgaaatcagacgccgatatttctcaacttctcgcctgccatcagtttgcgttcgatatgttccagcgtgacatttttggtttccggaatgagccagaaagtgatgcccacaaacgcaatgttcagcgcagtgtagagccagaacgtaccggcagcaccaatgctgtcgagcagcgtcaggaaggtcgcgccgataatcatattcgacacccagttcgtggtggtcgaacaggtaataccgaaatcgcggcatttcagcggctgaatttcagagcacaggatccacaccactggcgcggcgctcatcgcataaccggcaatacacatcatcgtcatgccaacagagagccaggacaagccactggaagccgtaccgttatcaaactgcatcaggcaatagcccagcaccagagtgcctaacgccatcacgctgaaaccaattttcagagccggtttacgccctgctttatctaccgtaaacaccgcaataaaggtggcgaacataaaggtcagccctacgaccagagtcgcaatcatctgttgttctgtggtcgtaaagcccgccattttgaagatacgcggcgcgtagtacatgatgatgttcataccggtaaactgctgcatcgcctgcaacaacataccgagaaacacagcacgacggacgttacggttgatcttaaacagtgcccaaccgccctgttttaacttcaggctttcacgaatttcgttgagttcttctcgcgctttttccgacgtatcgcgcagcatacgcaacacttcttccgcctcaatatgacgccccttttccgccagccagcgcgggctatttggcaggaagaccaccagaataatcagcaggactgctggtaaagcaagaacccccaacattgcgcgccagttaccgctataactgaacgctgtatcggataaaaacgccagcacgatgccgagtgtgaccatcaactggtacatactgatcatcttaccgcgaacgttttcacttgccatttcagaaagatacagaggagcggtgtaagacgcgatcccgacagcaatgcccagcaccacccgagcggcgattaacatctctacgctggtcgcaaaagcggaccctatagaaccgagtacaaacaggatggcccccgccatcaggctgtatttacgccccaggcggaacgacagccaaccattaaacagcgcaccaattgctgcgccgagcatcatgctactaaccacccattcctgcaaacgactggtcagcacaaagtgatcggtaatgaacggcaacgctccggcgattacgccgatatcaagaccaaataacaatcctgcgaccgcagcagctaccgaaacaaacatattcatacgccgcgtatcccgcaaagaacgtggcgttaaagcagattccgtattgatagtaaccattttttcctgccagcagagagtaagacatagtgaaaaaatacgtgaacaactcacacaggtgtcaggtcggaaacagcataaatatggattaaattgctgcgacatgtcgttatgtgatggatattccaattttcaaattaagttgaattattgagattattattaaccacctaattttacagcagataaaattcataaagttcattaattgataattgatatggattatttcataaccatgatatgaattatgatgacctacaggtataaaaaaccctgccatgaggcagggtcataaaagtaagaggaatgaattaacgagccagccaaccgccatctacggcaatggtataaccattcacataatctgaagcgctggaggcaaggaacactatcggccccatcaggtcactcggcagtccccaacgaccagctggaatgcggtcgagaatttccgcgctacgttgttcatctgcccgtagttgttgagtattgttggtcgccatgtaacccggagctatcgcattaacattaatgttgtgtttagcccattcgttcgccatcaatcgcgtcacgcccatcacgccgctttttgatgcggtataagaaggcacacggatcccgccctggaaggagagcattgacgtgatattgataatcttgccgccattgcgttgcgcgataaagtgtttcgccgctgcctgagacatgaagaatacgctcttgatattcaggttcatgacatcgtcccagtctttttcgctgaactcgagagcatcttcgcggcgaatcaatccggcgttattcaccaggatatcaatatgaccaaactcagctaccgcgcgatccagcagtgctggaatgccatcaatctttcgcagatcggcggtcaggcttaaaaaacgacgccccagcgccgtgacctgcttgatggtttcagtcggttcaacgatgttaatgccaacaatgtcacagcccgcttgcgccagccccaacgccatcccctggcccagtccagtatcacaaccagtgacgaccgcaactttaccttcgagagaaaatgcacttaaaatcataacaataccttattcgtttatgccgacaactagcgcaaatctttaacggccactatgccgacaactagcgcaaatctttaacggccacatggtccatatcatcaaagacctggttttcaccaaccatgccccagataaaggtataagctttggttccgacgccggaatggatcgaccagctgggggagatcaccgcctgctcgttatgcatcacaatgtgacgcgtttcttgcggctgccccatcatgtggaaaacgcaggcgtcatcatccatattgaaatagaaataaacttccatccggcgctcgtgagtgtgacacggcatggtgttccacaagttacctggagccagctccgtcagccccatactcaattggcaggtttccagcacatccgggacaaaatatttgttaattgtgcgacggttactggtgaggttatcgcctaacgtgactggagatacttcgtccggtgtgacttttttggtgggatacgtcgtatgcgcgggtgcgcaattgtaataaaactttgccggagtggcggtatcaatactggcaaagacaacttcttttgcacctttaccaacatacagggcgtcgcggtgaccgatttcatagcattggccatcgacagtaatcgtaccggcaccgccaatattgataacacctaactcgcgacgttcaaggaaatagcttacgccgagttgtttaccaacttccccgccaacggaaaccgttttagttatcggcataatgccgccaacaataattcggtcaatgtggctgtaaaccatggtgtactcatcggcgacaaataccttttcaaccaaaaattcattgcgcagcccttgggtatccagcgtttttgcgtgcgcactgtggatgctctgtcttacgtccacatcaacctccgataatcagtgaagcgtgaaaatagaaaacgatagtgaaacactgtttcgttttctctataaagggatgatatgcccatgggctagggttttcaattaaaaataaaacaatgtttcatttttaagttaaggattaaaaaaagtgcagtgtcgatcacgaatatgtcatgagaatggaaaaatgagggagcccagaaaatgtatgtcgacttgccagccatcattattcaacagattaatgacggcagatatttatcggtaaggaggaaatgcagagctactcgtcacgttcaatggtcaatgccacgccctggcccccgccgatacaaagcgttgccagccctttgcgggcattacgtttcaccatttcatgaaccagagaaaccaggattcggcaaccggaagcgcctatcgggtgaccgagtgcgatcgcgccaccattgacattgacccgacgctcatcccactcaagcatcttgccaaccgaaagcgcctgtgcagcaaacgcttcattagcctcgataagatcgacatcagccaactgccagcctacacgctccaggcaacggcgggtcgcatacaccggcgcaattcccatcaatgccggatctacaccaacgctggcaaatgcgcggatgcgggccagcacgggtaaattcaacgctcgtgctttggcttcgctcatcatcattaccgcagctgcgccatcgtttatggatgatgcattccccgcggtcacagaaccgagactatcaaatgaaggatttaaacgggctaaaccttctgcactggcgtcagtgcgtggctgttcatcggtatcaacaaccaacgtctgaccgttactttggatcattaccgggacgatctcatctttaaatcgtccggcgtcaatcgccgctcgcgctttttgttgcgagctaagtgcgtaagcatcctgcaactgacggctgatgccatattcgcgagccagattttcggcggtgacaccaatatgataatcattgaaggcatcccacaacccatcatgcaccagactgtcaaccaactggctattgccaagctgtgcaccggtgcggctatcagtcagaacatgtggtgcgcggctcatgttttcctggccaccggcgatgacaatatcagcctcgccacactgtatcgcctgagtagccagatgcagtgctttaagtccggaaccgcaaacgtcattaatcgtgattgcagaaacgctattaggaagaccacctttaatagccgattgccttgccggattctgccctgcccctgcagtcaacacctgaccaagaattacttcatccaccgcatatgcaggaacgccggtacgttctattaacgctttcacgaccagactaccaagttccacggcggaatgacccgctaacgcaccacgaaagcagccgataggtgtccgtaacgccccgacaatcacaacgtctttcatcacaacctcgcaccaattaacagtgcaatagtaaatgattgttaattacagttatcttaattgtttaaaaaaagtgatttttatcacaaaggaaatatgcctgagcagtagtcagagtcataactggcacgtaaggtttgcaaccactaacccaccaatagatgggtagataaggcgttaatctcccatacttaacctggtttatggtaaattgccctccattttgtttaatttgtagatgatacgttcagataatgtctaatatttggtctaaagaagaaactctgtggagtttcgcgctctacggcacagccgttggtgcaggcacgctcttccttcctattcagttaggttcggcaggggctgtggtcctgtttattactgctctggtcgcctggcctttaacatattggccacataaagccttatgccagttcatcctctcatcaaaaacatcagcatgtgaagggataacgggcgcggtaacacactactatggcaagaagattggtaatctgattaccacgctgtacttcatcgccttttttgtcgtcgtgttgatatatgcagtggcaattaccaactcacttacggaacagctggcaaagcatatggttattgatcttcgcatccgtatgttggtgagtctgggtgttgtattaattctgaatctcatttttctgatgggacgtcatgccactattcgggtaatgggatttttggtattcccattgattgcctatttcttatttctttccatttaccttgtcggtagttggcaacctgatctattaacgacccaggtagagttcaatcagaatacccttcaccagatatggatatcgattcccgtgatggttttcgcctttagccatacgcccattatttctacgtttgccatagacagacgtgaaaaatatggcgaacacgctatggataaatgcaaaaaaattatgaaagtcgcttatctcatcatctgcataagtgtactgttctttgtctttagctgcctgctttctattccaccttcgtatattgaagcggctaaagaagaaggggtcaccattttatcggcgctttctatgctgccgaacgccccagcatggttgtcaatttccgggattattgtcgcagtagttgcgatgtcgaaatcattcctgggtacgtactttggcgttattgaaggtgccacggaggtcgtcaaaacaacactacagcaggttggtgtaaagaaaagtcgtgcatttaaccgcgcactatcaattatgttggtatcgctgattaccttcattgtttgttgcattaacccgaacgcgatttcgatgatttatgcgatcagcggcccgctcattgccatgatacttttcatcatgcctacgttgtcaacgtatctgatcccggcgcttaaaccctggcgctccatcggaaatctgattacgctgatcgtgggtatcctgtgcgtatcggtaatgttctttagctaatatccgttgtggatggttcaaaattgctacaattttgaaccattccatttttcataatattcatttgttattattccgccctatcacttctctcgtcatatcctagaattatcagttagttaaacacacaaagagatctgaacatcttaaataagactatttaagatgcataacttagattcgcaagatatcttctggtcattcaaaaacaatttgcgatatagatattctcataccatgagatagttatctggaccacgttcgaccatgcaagattaaatcagtgaaacataatcatatttaataacgagaaatgcatttttaaatgtcttaatcagaattatagcaaatacagattaatcgcaatttttcccagcaaaattacaaaatcaagatgtattgacatcatcaatcaccaatgaaattatgcaattatatacggatagggaggttcttaacatggggctttgtagtcgttataaaagtcttacatgcaatagttgctcaatgcattgccaaataatgccagaagagtcaccgcgtttgcagtattgcgcaaactcgtgtttttgtatgtggcccgaagaaagttcatattttaatcgtggtgtggtggaaggtatcttaacaaaaaaccacaatgcgagattaagcggatatatttttgtggatttttcagtaagttttttacgtctattccttgaaaaagactggattgactatcttgcaagtactgacatggggatagttttagtcagcgaccgcaatatgcaatcgttagctaactactggcgaaaacacaacaccgcaatatctgctgtcatatataatgatgatggtcttgatgttgccaatgaaaagatcagacaactatttattggtcgttatttatcatttaccagaggtaacacattaactcagatggaattcaccataatggggtatatggtttctggttataatccatatcagattgctgaagtgctggatatggatatccgtagcatctacgcgtacaagcaacgaatcgaaaagagaatgggtggtaaaataaacgaattatttattcgttcacattcggtccaacattgatactcaacgaccagccagaatcatactctgttcatacgggcatctattgaaatgcccgtattttataaataagcagtaaccccaagagtaaacaacatagtatttaaaaccatcacacgaaaaattcagaagcattacgaaatatgaatttacaaacaatagtggcataaatgttaaccatgttaatttacgtaaagttttacgttgcaacattaaagcctcatttcaatcatcatgataaatataaaattaatatatatttatgccgtaaataccaatatacttagcaaactatgtgatctccatttcgattgatttagtgtttattgacgtatgtactggattattaacgataatatcgagttctggcctgagcaccgaaaattaatatcggtacataacgccgatcttaacgtcgttctgacaacgccagccagtcgatgtttatcacttctacttgaagcttttcctgatgtggttacacaacaagattttttcaccagagtctgggaagaagaaggtatgcgtgtgcctactaacacgttatatcagaacatatccattatcagacgcggatttcgcgctgttggtgatactacccactcgctaattgcaaccgtgccgagagaggattcaagatcggtaatgactccaacttattgatagtgttttatgttcagataatgcccgatgactttgtcatgcagctccaccgattttgagaacgacagcgacttccgtcccagccgtgccaggtgctgcctcagattcaggttatgccgctcaattcgctgcgtatatcgcttgctgattacgtgcagctttcccttcaggcgggattcatacagcggccagccatccgtcatccatatcaccacgtcaaagggtgacagcaggctcataagacgccccagcgtcgccatagtgcgttcaccgaatacgtgcgcaacaaccgtcttccggagactgtcatacgcgtaaaacagccagcgctggcgcgatttagccccgacatagccccactgttcgtccatttccgcgcagacgatgacgtcactgcccggctgtatgcgcgaggttaccgactgcggcctgagttttttaagtgacgtaaaatcgtgttgaggccaacgcccataatgcgtgcagttgcccggcatccaacgccattcatggccatatcaatgattttctggtgcgtaccgggttgagaagcggtgtaagtgaactgcagttgccatgttttacggcagtgagagcagagatagcgctgatgtccggcagtgcttttgccgttacgcaccaccccgtcagtagctgaacaggagggacagctgatagaaacagaagccactggagcacctcaaaaacaccatcatacactaaatcagtaagttggcagcatcaccttcaagatccataatgacattaacatacaaaatcatgtaataaactcgtcaacagacgcacatacacacaatgccccacctgccataaaagttaatgcgggatacaaagagagcattggtggcgcaaagaatttcaataacaaaatcctcaaacatataaaaagtcatctaattatgttgagcgcatttgtcataggcgcatattctgcatattggctatggaataataatcaaccgaagccatttttcaaggattacaagactgttgcggaaattaatggctgccattttaatgtaacagaagatacaattgatgggttgaaagagttcgataaatataaaacacggatactggattcggggattaactgtaaaaaatatccgtggttatacttccctcttgcaaaatcctcaccggggatgattgttatggcatgcaataaaaactataaccaacatgaagtggcagactgtttaaccctgtcttaccgtgaggttaatcgtgattgattataaaaaaaacttattatttattttagtttttatcagtgggtttattctcttcactgtctattcttacactgcagaaaaaatgatatataacgaaacatgcactgcaaattgggtaatttttaatgaccagggacgagcaaatcttaccatcgactttatgtataacaaaaaaaataaaacaggaactgttgcgttgagtggaacctggcaacaaggtaacagagaaagtaaatcaatacggcgaaatattgaatacacatggattgaaaactatgacacagcccatttaacatcaaagaaagttaataagtttgagattatggatcaagttgatgatgatagacttgcacaacttattcctgatttttatgtctttccagaaaaaagtgtaagctataatatactaaagcaaggtaagcatgcttttattttgagcattggtaacagagcaataatgcattgtgcaaggtaaactaaaatagataacaaaaaagatggaacctcgttaatcataaaacaataaaattaaatattctcgcagtatatggcagtctaaagcatcaaagttttgatcaacatctttcattttagacatctccttgcaatgtaaaatatcatgtatcaacaacatctggtgcaaatccatgagtcgaactcgacattcatcttagctcgattattattccttcgtacagtcgatgtaaacaatacagaaagaggattattaagaaccagtttactcaggaatcaatagaggaaaggactaacgtttctttaaaagaattgatttcatcatctgttaaactaaactcatcattgacagatcgtgagatataactgtttttaactttactctttacgttgactttattgacagaattaacattcacatatcttgaatttaatgtccatgatgttgtttgcgtgagaacattctcagcattaaggaatttttttaacggaatccttggtttctttttcgagtccgaatttacaatatcatgcatatagaccatttcatgaatctgcgaaaactcaatgtccattgtatacctcacatttttaccgtgactcgatgttactgttcaataatcaccttccatcaatactaaaattaatacccctaatgtgccgataacaaatatagtcattctacgtaacgtctccataaggtgataaccttgatcaaatgaatttcgaatataataaaggaaatcttttgagatgtttatcacgaataaagctatttatgttaccaatatcatttcgagtgcgcacactatctatctgttttttcgagatataaaaaacaacgtgtaagttatgtaaattgccgatgctactgagtaacattatggtaaaaaaagtaaaaatgagcgatttttgatagaataaagcatgagaaaaggtgatatttgacattatcagaagctgcgaattcggattttgctctaatcaaatgagagaaatgtaaaatgaagccacgaaatattaataatagcctaccactgcaaccattagttcctgatcaggagaacaaaaataagaaaaatgaagagaaatccgttaatccagttaaaatcacaatggggtctggtttaaattatattgaacaagaatctcttggaggaaaatatctaacacatgatttgtcaataaagatagcggatatttctgaagagataattcagcaagcaatattatctgctatgagcatatataaattttcgataacagatgatttaatgagtatggctgtaaatgaactcataaaactgaccaaaatagagaataatgtagacctgaataaattcactactatatgcacagacgttctatcccccctcgtcaccagacataataaagaaaaaaaacaaacgacattctacccttctcaaaaatcccctttttaattttcattgaaaaaatggcaattgatactatgaatccaggtcatacacattaaggcatttatgtaatgtcgtaattaagataactaataaggtgaatattagtaaaacaactaatgatgttattagtttgtagtgaacagtacttttaccaataatgaaaaatataccataagcaatgcaagcttaaaactaataatttaaaaaagataaatgtaaaaatattaatgagtcaatcaataataatttagcatcacgagacacatcacagaggaatattatgagcacagaaacaattgaaatattcaataatagtgatgaatgggcaaatcaactaaaacacgcattatcgaaaggagaaaatctggcattactacatggtttaactcctgatatccttgatagaatatatgcatatgcattcgactaccatgaaaagggtaatataacggacgcagaaatttattataaatttttgtgcatttatgcgttcgaaaatcatgagtatctaaaagattttgcatcagtatgtcagccaaaaaagaaatatcaacaagcatatgacctttacaaactaagttacaattactccccgtatgatgactattcagttatttatcgtatgggtcaatgtcagattggggctaaaaatatcgataacgcaatgcaatgtttctatcacattattaacaattgtgaggatgatagtgttaagagtaaagcgcaggcatatattgaactcttaaacgataattcagaagataatggctaagcattacaatcatttggttaaatttgctggttatagtgcagttaactactataaccagcacctcttatgttttcttaaatcagcatcttaaaacagttaagagcatactataaatcattatttttcaatgcgttagagaacaatctactttataaaaattgaataaggctatttcagattacatcactgaattcctaagataaattagtgaacacaaccatagatatgtcgaatgtattttcctgtagcattaatgacacataaatatgaatagccataatttctattgcttaagcaggatgcaagaaaccaattttttcatagaggttaactaatggacttagaaaataaattctcatatcattttcttgagggattaacgctcacggaagatggaattcttactcaaggaaatgagcaagtttatattccacagaaagagttaggtgtattaatagtattacttgaatccgctggtcatgttgtactgaaagatatgatcatcgaatcagtatggaaaaatattattgttagtgacgagtccctgacaagatgtatctattctttgcgctgcatttttgaaaaaattggctatgatcgttgcatagaaacaatctaccggaaaggttatcgtttcagcgggcaggttttcaaaactaaaattaatgaagataatacttcagactattccatagctatattccctttcactacttcattgaatacactggatccattaatacttaatcaggaattagtgcaaatcatttcaaataaaaaaatcgatggttagactggccccctgaatctccagacaaccagtatcacttaaataagtgatagtcttaatactaaatagctgcgcttaataccgctacacttttgccagcccatgtttgcctccggggaatgggctgacggtttccataaaatggcgaacttttttcaacagttgccacattgagctgcactgatgattacgcgttattgtgtcgtgaagtgcctgccatagccgttcaacatgattcacccatggcgagtaaaccggctgataaatgaccctgaacttcgggttctccttcagccagctctgtgtttcccggcttttgtggataatgtagttgtccacgatcagcgtgatggttttcgcccgacggtatgtcgctttaagccgcttcagcaggctgatgaacagcgccgaacttttgctgttgccgcccacacagctgactttacctgtcccgctgtgcagcgctccggccagataatatttttcattctgtcccggcgtgaccacccgtttttgctgtccgcgcagttgccagtccgcaccgattttgggattaagatggatatccacttcatcttcataaaagaccggatgctctgcgctgcattcgtccagtgctttatggattgctgccatcttttcatctttatgcgggtcacggatacgcagagttggcgcagcccttcgccacacaatccccgcagacggcaaccagcggcgaacggttccggcatttaactggcaaccggttatctcattgatttttattgccagcagttctgtactccagcgtgaacgctggtagccaaagtcgccgggagaatgttttaccagctcacgtaacagtgtgcagatatgctcaaacggccagcgacgggcacgcccggcaggtaatgatttcagtccctcaacacccgactgcgtgaaccagttaatccagcgtccaacagaggaacgggcgcagcagagcgttctggcaacgtcgctgacacggtcgccccggtgcagcatcagcatggcagtcagtctgcgggcataatttttatcgtgtgttttatggatggctttctgcatcaggcgtcgttcgtcacgggaaattggtgctatgatcggcattgctcagtccggttggtgatttgttttgatttggcgattgatcagatcgcacaatccgggctaagttccctcaaagtgatctactattccgcgcagctatttagtttttagactagtcattggagagcagatgattgatgtcttaggaccggagaaacgcagacggcgtaccacacaggaaaagatcgcaattgttcagcagagctttgaaccggggatgacggtctccctcgttgcccggcaacatggtgtagcagccagccagttatttctctggcgtaagcaataccaggaaggaagtcttactgctgtcgccgccggagaacaggttgttcctgcctctgaacttgctgccgccatgaagcagattaaagaactccagcgcctgctcggcaagaaaacgatggaaaatgaactcctcaaagaagccgttgaatatggacgggcaaaaaagtggatagcgcacgcgcccttattgcccggggatggggagtaagcttagtcagccgttgtctccgggtgtcgcgtgcgcagttgcacgtcattctcagacgaaccgatgactggatggatggccgccacagtcgtcacactgatgatacggatgtgcttctccgtatacaccatgttatcggagagctgcccacgtatggttatcgtcgggtatgggcgctgcttcgcagacaggcagaacttgatggtatgcctgcgatcaatgccaaacgtgtttaccggatcatgcgccagaatgcgctgttgcttgagcgaaaacctgctgtaccgccatcgaaacgggcacatacaggcagagtggccgtgaaagaaagcaatcagcgatggtgctctgacgggttcgagttctgctgtgataacggagagagactgcgtgtcacgttcgcgctggactgctgtgatcgtgaggcactgcactgggcggtgactaccggcggcttcaacagtgaaacagtacaggacgtcatgctgggagcggtggaacgccgcttcggcaacgatcttccgtcgtctccagtggagtggctgacggataatggttcatgctaccgggctaatgaaacacaccagttcgcccggatgttgggacttgaaccgaagaacacggcggtgcggagtccggagagtaacggaatagcagagagcttcgtgaaaacgataaagcgtgactacatcagtatcatgcccaaaccagacgggttaacggcagcaaagaaccttgcagaggcgttcgagcattataacgaatggcatccgcatagtgcgctgggttatcgctcgccacgggaatatctgcggcagcgggcttgtaatgggttaagtgataacagatgtctggaaatataggggcaaatccatctcttttcgcatgtgaattttgatcggtatcggttttaatatcattgaaccaaaaatttgccgactgataattatccttctcgtatctttttataccatacggacctgctagttttttaactatttttagaacctgctcttttcttctggtgtttatctttgcaagatttgcaggataaataacattaagtaaagccgcatcggcttctctgtaatgtttatctttttccagataacctggggattctccccctaaatcaagctgtaacgttattctttcataacctttatctatgaggtggttcaacctcgttgttgaaagaggttcatccagttcattggctttagcttcgcgtagtaaatcagagacaaaaacagagtctttcttcgagagtaagttcgacaaacgttccagtccagaggtcaccagtgcaacggaagatgtgtttaatcgggcatcttcttcccatgctccggaatcttccataacatagaaattggctttatccagataagcaatcagcagcgcaaccgattttaatcggtcacctttttgccaatcttcagcgttaattgtaccagtgtcgattgcttgtataaggagatcaagataaagacctaacgcatcattttgtttatggttccacagctgcggcttgccttcttcctgcacatctgccatcacgggggagttgctgtcaaatcggatatgcacagcattcatttgcccgggaactccatccagtcgtttggggttgctaatgacgtcctgcatccgcttaatctggtcgagcgtagacatataatcccacagggtgagcagaaccttttttgcggctacactatttccctgatctgatactaatgccatatagccccataaactatccctcagccagacagcatcatagtgggtttctgccgctgttttgtcatcttcgaaagtagaagcaagaataaatgttccccagggtttctccgtcaacgttaactttcgtgtgttttctgttaatgttaacaacccttgaatttcgtctttggtatagtggctctttatttcattttttaatttggctgagtgaatcagaagacgataattagggtacttatctggatttaacgataaataacttttatctgttgctgcccccgtggaattaagaatgttaaatacagattcactcgtcacttctgcccctgtcgcctggcatgtgccgcacgaaaatataccagcgagcagaagagttaatgcagatttccctttcataaaatattccatcaatcgtttgttaaaagcgtaaataaccacttatttaacaacttgaaaataaggtgttttacctgggttgttacaaaaggattgcattgcgtaaacgctttttatttacaacaaaatggggaaatattacggcgattgcgaaaagtctgaagcgattgaattaagataatatagaaaatcagatacagcaaaagcggcgaagggaatcgaaccctcgtatagagcttgggaagctctcgttctaccattgaactacgcccgcttcgagatgcgtaaggcattataaaccttacgctctccttagcaagtgccgcgctgctgactgctgattaattcgccatcagcattttggcttgctgccctgcggcggcaagtaacgtagcggatcaattgccgttgcacggtaacgaatctggaaatgcaggcgaacagatgccgcatccgtgctccccatagtggcgattttttgcccagccttcacgctttgcccattatttaccagcatcgtgtcattatgggcgtaagccgtaatgtaatcttcactgtgtttaatcatgatgagattaccgtagccacgcagctggttgcccacatacaccacctttcctgcacccgcggcgtaaataggtgtaccccgtggagctgagatatcaatccctttattgccgccatctgctgtcgaatacggcatgataactttccctgtcgttggccataaccaacaacgttgccctactggcggccaggatgatttcggtaccgctgatgacggtgtaaccgatgcggttttggtcgttgatttggcggttgatttacgtgtactactgctacttttcgccccacccagttttagtttctgaccaacttcaatggtgtaagggggggaaatgccgttcagtcgcgccagttcttttacgctggttcccgtggtgcgcgaaatacgatatagcgtatccccccgtttcacggtgtaaacggagccggaatacgttcctgtatcggatgatttgctacccgaacagcccgccaaaagcagtccaaccgataacaacatcacgatacccagagattttttattcaggcgtcccgcactcaaaatctttcctcgcttaaaaaacaagacgccttatcatagcagccagcctcttgatacccaatctcttgcttctggaaaaacgtggtaatagagaaagaggttaatttcatttggcaaagggaagtatcatcagcaaaatattcgctgtagaggtatcgaacttcctgactttttaccctatttcccatcctgatgcgtaataatcccaatttatcacattgattttatcgccactcatattgatacgtatcactgcccctattcagagtcctgtttcgtatcatatctgtgtttttttaacgtcatcacacttcctacctcccctaacgcttatcgtcgtttctggcgtaaatcttgcctgcttagactaaatctttgccataagaaccaaatgttcaaatcgaggggatttctatggaagcgcgggaagcaaccgctacgggtgaatcatgcatgcgcgtcgatgccattgctaaggtcaccgggcgggcacgatatactgacgattatgttatggcgggcatgtgttatgcgaaatatgtacgtagccctatcgcacatggttatgccgtaagtattaatgatgaacaagccagaagtttgccgggcgtactggcgatttttacctgggaagatgtgcctgatattccattcgctacagctgggcatgcctggacacttgacgaaaacaagcgcgataccgccgatcgcgcactgctaactcgccatgttcgtcatcatggtgacgccgttgccatcgtcgtggcccgcgatgaactcacggcagaaaaagcggcgcaattggtcagcattgagtggcaagaattacccgttatcaccacgccagaagcggcgctggcagaagacgctgcaccaatccataacggtggcaatttactgaaacaaagcacgatgtcgacgggtaatgtccaacaaacaatcgatgccgccgactaccaggtacaggggcactatcagacccccgttattcaacattgtcacatggaaagcgtaacatcgctggcgtggatggaggatgactcgcgaattaccatcgtttccagcacccagatcccgcacattgttcgccgcgtggttggtcaggcgctggatattccctggtcatgcgtacgagtcatcaaaccgtttgtcggtggcggttttggtaataaacaggatgtactggaagagccaatggcagcattcctgaccagcaagcttggcggcattccggtgaaagtttcccttagccgtgaagagtgtttcctcgcaacccgtacccgccacgcttttaccattgacgggcaaatgggcgtgaaccgcgacggaacattgaaaggttatagtctggatgttctgtctaacaccggcgcttatgcatctcacgggcactccatcgcttctgcggggaggaataaagtcgcttacctttatcctcgttgtgcctacgcttacagttcaaagacctgctataccaacctcccctcggctggtgcgatgcgtggttatggcgcgccacaagtcgtatttgccgttgagtctatgcttgatgacgccgcgacagcgttaggtattgatcctgttgaaattcgtttacgcaacgccgcccgcgaaggagatgctaatccgctcacgggcaaacgtatttacagcgcagggttgccggagtgtcttgaaaaaggccggaaaatctttgaatgggaaaaacgccgtgcagaatgccagaaccagcaaggcaatttgcgccgcggcgttggcgtcgcctgttttagctatacctctaacacctggcctgtcggcgtagaaatagcaggcgcgcgccttctgatgaatcaggatggaaccatcaacgtgcaaagcggcgcgacggaaatcggtcagggtgccgacaccgtcttctcgcaaatggtggcagaaaccgtgggggttccggtcagcgacgttcgcgttatttcaactcaagataccgacgttacgccgttcgctcccggcgcatttgcctcacgccagagctatgttgccgcgcctgcgctgcgcagtgcggcactattattaaaagagaaaatcatcgctcacgccgcagtcatgctacatcagtcagcgatgaatctgaccctgataaaaggccatatcgtgctggttgaacgaccggaagagccgttaatgtcgttaaaagatttggcgatggacgctttctaccaccctgaacgcggcgggcagctctctgctgaaagctccatcaaaaccaccactaacccatcggcgtttggctgtacctttgttgatctgacggtcgatattgcgctgtgcaaagtcaccatcaaccgcatcctcaacgttcatgattcagggcatattcttaatccactgctggcagaaggtcaggtacacggcggaatgggaatgggcattggctgggcgctatttgaagagatgatcatcgatgctaaaagcggcgtggtccgtaaccccaatctgctggattacaaaatgccgaccatgccggatctgccacaactggaaagcgcgttcgtcgaaatcaatgagccgcaatccgcatacggacataagtcactgggtgagccaccaataattcctgttgccgctgctattcgtaacgcggtgaagatggctaccggtgttgcaatcaatacactgccgctgacgccaaaacggttatatgaagagttccatctggcaggattgatttgaggataacatcatgtttgattttgcttcttaccatcgcgcagcaacccttgccgatgccatcaacctgctggctgacaacccgcaggccaaactgctcgccgatggcactgacgtactgattcagctccaccatcacaatgaccgttatcgccatattgttgatattcataatctggcggagctgcggggaattacgctggcggaagatggctcgctacgtatcggctctgcaacgacatttacccagctaatagaagctcctataactcaacgtcatctcccggcgttatgtgctgcggccacgtccattgctggaccgcagatccgtaacgtcgctacctacggtggaaatatttgcaacggtgccaccagcgcagattctgccacgccaacgctaatttatgacgcgaaactggagatccactccccgcgcggtgttcgtttcgtcccgattaatggctttcacaccgggccgggcaaagtgtctcttgagcatgacgaaatcctcgtcgcctttcattttccgccacagccgaaagaacacgcgggcagcgcgcattttaaatatgccatgcgcgacgcaatggatatttcaacgattggctgcgccgcacattgccgactggataacggcaatttcagcgaattacgcctggcatttggtgttgccgcgccaacgccgattcgctgccaacatgccgaacagactgcacaaaatgcgccattaaacctgcaaacgctggaagctatcagcgaatctgtcctgcaagatgtcgccccgcgttcttcatggcgggccagtaaagagtttcgtctgcatctcatccagacgatgaccaaaaaagtgattagcgaagccgtcgccgcggcggggggaaaattgcaatgaatcacagcgaaacaattaccatcgaatgcaccattaacgggatgccttttcagcttcacgccgcaccaggcacgccgctctcggaattactccgcgaacaaggactgctaagtgtcaaacaagggtgctgcgtgggtgaatgtggtgcctgtacggtgttggtcgacggcacagcaatagacagttgcttataccttgccgcctgggctgaaggaaaggagatccgcacgctggaaggtgaagcgaaaggcggaaaactttctcatgttcagcaggcttatgcgaaatccggcgcagtgcagtgcgggttttgtacgcctggcctgattatggctaccacggcaatgctggcgaaaccacgcgagaagccattaaccattacggaaattcgtcgcggactggcgggaaatctttgtcgctgcacggggtatcagatgattgtaaatacagttctggattgcgagaaaacgaagtaaaaggatatccggcctgaattcaggccggattcactgaggttatgtgtttaacaactcatatttcttaatcttgcgatagagcgtagcaatgccgatgcccagttcatcagcaacttgcttcttgctgttatgacgtgaaagcgcctcgcggatcatttgcttttccatctcctccagcgccgtgccgcccgcatcatcgagtgacaggtgcgcctcactgacctctgttacatcactttgctccgttgtgccattattcagcagatttggcggcaatagcgtgctgtcgataacttcacctgaaggaaccacgttaaccagatattccatcaaattgcttaactcgcgcaggtttccgggccaacgatgcttacgcaatatttcgacgacatcgggagcaatgccaggataaaccgatcccagacgacgggtatgcagatgtaaaaagtaatgcaccaatagttcaatatcttcctgacgttcacgcagcggtggcagagttatcgggataacattaagtcggtagaagagatcttcgcggaatttaccttcggcaatgaactgggccaaattctgattagttgcagaaatgatgcgaatgtcgacttgtattgggctactggcaccaatcggcagaatttcacgcgcctcaatagcgcgcagtaatttagcctgcaacattaatggcatatcacctatttcatcgagaaacagcgtgcccgtattcgccgcctgaatcaaccctgttttaccgttggcagaagcactagtaaatgcgcctttaacataaccgaacagttcgctttccagaagctgctccggaatcgcggcacagttgatagcaataaagggtttattccgtcttccgctcaacttatggattgctcgggcgacgacttctttacccgtgccgctttcaccaaccaccataacgctggatgggctgggtgcaatacggctaatgagtcgttttaattgccgcataacacggcactcgccaaccaattgttcaatatgtggttcatcaggtgcatttgctacagaaaaactggtatgcgattggtgaaatgccattaaaaataattgtcggccctgaatgttatgcaattgaccaatgattaattcacttttatcgtcccacgaaacaatatgctgcatatgtccatgagtaaaattactctcaaatgttaatggtctgaaacggataggtttcccaataatattattttgtacaacaccaagtgtttttaaggcagtctgattaacaaactgaacccgactttcatcatcaacaactaatacgccctgatccatattatcgatcatggtcgcgaatattttactgatgttatctcctggcccctgatcctccagaagtttcgaaacaaaaatggtggatatatggcgaacataatcagaaaattcgcgtaaattatcactgatatgctcttgttgctcgtgggtaacggcaatcaaacttatcaccccaacacaacgatcctgtaaaatgacaggcgtacccagaaatgctttttcgcggcaattttctttactatcgcaaccttcgcaaaggggatcgaagcgagactgtgtcacaactttttcagttttcgtttccaggacgtggcggagcaggcgtgagttgccgctcaactggcgaccaagaaacttcccatacgcgcccgttccggcgacgcgacacaagttttcatcaacgatctcaacctcaaactgcaaaacgctggcaagcattctggcaaaacgctgaattgtcggttgaatttgcatcaatactgactgcgtagtagcaagctccatagctttaccttccagacttacttaaaagtcgatcattgaagacgttgatggttcacagatcatgatgatattaactcaggcgaaattggctttgataaaaacataagatttttatcattttctaatgcaattatggaagagatatcacatttctatatcaatatgagaattacggcggtgagtttatcaaactgaagagagatagcctgcccctttatcttatttctgatacttagcagcaaataaataacgcgataaaaaaagccaaacgttttcgtattttacaaacaaccagaagctggcatcaatttgtgaacaaccccacacattatccgtcaaattagtcttttgcagccgcgcggataattctggcacacttattgttagtcccaggtatagctatgaaaacaccaatcactttggcaagtcacagtgaaataaaccactttgcctgtcattccactaccgggactgtatgatgaaaactgttaatgagctgattaaggatatcaattcgctgacctctcaccttcacgagaaagattttttgttaacgtgggaacagacgccagatgaactgaaacaagtactggacgttgccgcagcattaaaagcactgcgtgctgaaaacatctcaaccaaagtctttaatagtggattaggtatttccgtattccgcgacaactccacccgtacccgcttctcttatgcttccgcgcttaacctgctcggccttgcacaacaagatctcgacgaaggcaaatcacaaatcgctcacggcgaaaccgtgcgtgaaaccgccaatatgatctccttctgcgccgacgctattggtattcgcgacgatatgtatctgggcgcaggcaacgcctatatgcgtgaagttggcgctgcacttgatgacggttacaagcagggtgtactgccacagcgtccggctttagtgaacctgcaatgcgatattgaccacccgactcagtcaatggctgacctcgcgtggttacgtgaacactttggttcactggaaaacctgaaaggtaaaaaaatcgccatgacctgggcctactctccaagctatggcaaaccgctctctgtaccacaaggcatcatcggtctgatgactcgcttcggtatggatgtcaccttggcccatccggaaggctacgacctgatcccggatgtggttgaagtggcgaaaaacaatgctaaagcctccggtggtagcttccgtcaggtcaccagcatggaagaagccttcaaagacgcagacatcgtttatccgaagtcatgggcaccttacaaagtgatggaagagcgtactgaattgctgcgtgcgaacgaccacgaaggcttaaaagcactggaaaaacagtgtctggcacagaacgcgcaacacaaagactggcattgtactgaagagatgatggaactgacccgtgatggcgaagccctgtacatgcactgcctgccagctgatatcagcggcgtatcctgcaaagaaggtgaagtgactgaaggcgtattcgaaaaataccgtatcgctacctacaaagaagccagctggaagccttatatcatcgccgcgatgatcctgtcccgtaaatacgccaaaccaggtgcactgctcgagcaactgctgaaagaagcgcaagaacgcgtgaaataacccctcgggccgatctgctggtcggccctctatttccagaggccaaaaggataggatatgtccgttttctcattgaagattgatatcgccgataacaaatttttcaacggcgaaacatcaccgctcttttcgcaaagccaggccaaactggcgcgccagttccaccagaaaatagctggttatcgcccaacaccgctttgtgcgctggacgatctcgcaaacctttttggtgtgaagaaaattctcgtcaaagacgaatcaaaacgattcggtctgaacgccttcaaaatgcttggcggtgcgtacgccatcgctcaattattgtgtgaaaaatatcatcttgatatcgaaacgctgtcatttgagcacctgaaaaatgccatcggcgaaaaaatgactttcgcgaccaccaccgacggcaaccacgggcgcggtgtggcgtgggcagcacagcaactcggacagaatgcggtgatttacatgccgaaaggttctgctcaggaacgcgttgacgccattctgaacctcggtgccgagtgcatcgtcacggatatgaactatgacgataccgttcgcctgaccatgcaacacgcgcagcagcacggctgggaagtggtacaggacacggcatgggaaggttacaccaaaatcccaacctggatcatgcaaggctacgcaaccctggcagatgaagccgtcgagcaaatgcgtgaaatgggcgtaaccccgacgcacgttctgctgcaagccggtgtcggagcaatggccggtggtgtgctgggttatctggtcgacgtctacagcccgcaaaatctgcacagcattattgttgaacctgacaaagctgactgtatttatcgctccggcgtcaaaggcgacatcgtcaacgttggcggtgatatggccaccatcatggcgggcctggcctgtggcgaacctaacccgctgggctgggaaatcctacgtaactgcgccacccaattcatctcctgccaggacagcgttgccgcattaggtatgcgcgtgctgggtaatccgtacggcaacgacccgcgcatcatctccggtgaatccggcgctgtcggtttgggcgttctcgcagcggttcattatcacccgcaacatcaaagcctgatggaaaaactggcgctggacaaagatgccgtagtgctggttatcagcactgaaggcgacaccgacgtgaagcactaccgcgaagttgtctgggaaggcaaacacgctgtagcaccttaatcaccctattggaactactccctgcaaaacggggagtaaaaaatctggagaaaaataatggctaagaatattccattcaaactgattcttgaaaaagcaaaagattaccaggcggacatgactcgcttcctgcgcgacatggttgctattcccagtgaaagctgcgacgaaaaacgcgtagtacatcgtattaaagaagagatggaaaaagtcggcttcgataaagttgaaatcgacccgatgggcaacgttctcggttatatcggccacggcccgcgtctggtggcaatggacgctcatatcgataccgtcggcattggcaacatcaaaaactgggacttcgatccgtacgaaggcatggaaactgatgagctaatcggtggtcgcggtacttccgaccaggaaggcggcatggcatctatggtttatgccggtaaaatcattaaagacctcggtctggaagatgaatataccctgctggttaccggtactgtgcaggaagaagactgcgacggtctgtgctggcagtacattattgaacaatccggcattcgcccggaatttgtggtcagtaccgaaccaaccgactgccagatataccgtggtcagcgcggtcgtatggaaattcgtattgatgttcagggtgttagctgccacggttctgcgccagaacgcggtgacaacgccattttcaaaatgggtccgattcttggcgaattacaagaactctcccaacgtctgggttatgacgaattcctcggcaaaggcaccctcaccgtttctgaaatcttcttcacatccccaagccgttgcgctgtagcagatagctgcgccgtctctattgaccgccgtctgacctggggcgaaacctgggaaggcgcgctggacgaaatccgcgccctgcctgcagtacagaaagctaacgcggttgtttctatgtacaactacgaccgtccgtcctggactggcctggtttacccaaccgaatgctacttcccgacctggaaagtggaagaagatcacttcaccgttaaagcactggtgaatgcctacgaagggctgtttggcaaagcgccggttgttgataagtggaccttctcaactaacggcgtatctatcatgggccgtcacggcattccggtgatcggctttggcccgggtaaagaacctgaagcgcatgcacctaacgaaaaaacctggaaatctcacctggtgacctgtgccgcgatgtacgctgcaatcccgttaagctggctggcaacagagtaattactcttcacttattcccctccggttcgccggagggtttttggagtttgctatgcgcgtattgatcaaaaacggcactgtcgttaacgcagatggacaagccaaacaggatttgctgattgaaagcgggattgttcgccagttgggcaacaatatttcgccgcagctcccgtatgaagaaattgatgccactggctgttacgttttccctggcggcgtggatgtccatacgcatttcaatattgatgtcggcatcgcgcgcagttgtgatgatttttttaccggtacccgcgcagctgcgtgtggcggtacaacaaccattattgaccatatgggatttggcccaaacggctgtcggttacgccatcaactggaggtttatcgtggttatgccgcccataaagcggtcatcgattacagctttcacggtgtgatccagcacattaatcacgcaatcctcgacgaaatcccgatgatggtcgaggaaggactgagcagttttaaactctatttaacctatcaatacaaactcaacgatgacgaggttttgcaggcattacgccgcttgcatgaatccggcgcgctgaccaccgtgcacccggaaaatgatgcggctatcgccagcaagcgggcggaatttatcgccgcagggttaaccgcgccgcgctatcatgccttgagtcgccctctggaatgcgaagcggaagccatcgcccgcatgattaacctggcacaaattgccggtaacgccccgctctatatcgtgcacctgtctaacggcttaggtctggattatctgcgtcttgcccgtgcgaatcaccagccagtctgggttgaaacctgcccacaatatctcctgttggacgaacgcagttacgatacagaagatggcatgaagttcattcttagcccaccgctgcgtaacgtacgcgagcaggacaaactgtggtgtggcatcagcgatggtgcgattgacgtggtggcgaccgatcactgcaccttctcgatggctcaacgcctgcaaatttctaaaggcgatttcagtcgctgcccaaatggcttacccggtgtggaaaaccgcatgcagttactgttttccagtggcgtgatgacgggacgtataacaccggaacgctttgttgaattaaccagcgcaatgcccgccaggctgtttggcctgtggccgcaaaaaggattattagcgcccggttccgatggcgacgtggtgattatcgacccacgtcagagccaacaaattcagcatcgccatctccacgacaacgccgactactcgccatgggagggttttacctgtcagggcgcgattgtcagaaccttatcccgtggtgaaacgattttctgtgacggcacctttacaggcaaagccgggcgaggtcgtttcctgcgacgcaaaccgtttgtccctcccgtgctctaaccactgtcagggatctatacacaatcaagaatgatgagtgaggaaaaatgagtaagaaaattgttctcgccctgggcgggaatgcgctgggcgatgacctggccggacaaatgaaagcggtaaaaattacttctcaggcaattgttgatttaattgcccaaggacatgaagttatcgtcactcatggtaacgggccgcaggtgggcatgattaaccaagcctttgaagctgccgcaaaaactgaagcacactcgccaatgctgccgatgtctgtctgtgttgccttaagccagggttatattggttacgatctacaaaacgcgttaagagaagaactgctttctcggggcattaataaacctgtagcaacgctggttactcaggtcgaagtcgacgctaacgatccggcattcctcaacccgaccaagccgatcggttcgttctttaccgagcaagaagcagagcaactgacaaaacagggttacactctgaaagaagatgctggtcgcggctatcgccgtgttgttgcctcgccaaaaccggttgatatcattgaaaaagaaacggttaaagctctggtagatgcaggccaggtggtgatcgccgttggcggtggtggtatccctgttattcgtgaaggtaaccatctgcgtggtgccagcgcggttatcgataaagactgggccagcgcccgtttagcagaaatgattgatgccgatatgctgatcattctgactgcggtagaaaaagtggccattaacttcggtaaagagaatgaacagtggctcgatcgcctgtcattaagtgatgctgaacgctttatcgaagaaggtcattttgcgaaaggttctatgctgcctaaagtggaagctgccgcctcgtttgctcgctctcgcgcaggtcgtgaagcactgattaccgtattgagcaaagcgaaagaagggattgaaggcaaaaccggaacggtgatttgtcagtaattttaaggccgggtgggtaataccatccggccattttcatttaagccacttccagcacttcttttgtcgctttcacgccctgatgcatcaacatcattaacgcctcaagtacgccgccgccaatcgcccgggctttatcagaaacgctggtgaaatcagcggtttcaccacgaggatcgatatcaccaattttaaaaccaccaaccactgccaggccgtcgttcaacaagccacgcaccatccccgtcaacggtgctttaatttcatgctcaccaatccaggcaatcacatcgccctctttcaccagatcgcctaatttcacgttggatcgcataatgcctgcagcaggagcacggatcacccgtcgggtggtatgccccataatattgccaggaacatcggtattctcctgcgcacaaccagagtaaatcacctgaccgagccagtgcccgcgatttgtttcaattaccgcatgacaatccttccctgcagtaaagcccggcccaagcgcgattgttactggtgccatatctgcccgcgttcccaaattctgtttcgccagaatagcgtccaccacgcaaagcggtttcagttcatcaagcaatgaacaggcgggatctaccatcacagggatgaatccgcgttcggtaagtttcatcgcttccgcagagctggttgccaggcgagcagtgacgccttcgaccgtcatttcgccatcgaacacggcctgggcaaacgccacggtacaacgaatcactgtcggtttttccacttccagcatgatcactttaaaacccgcatgatacagacgtagcgccacaccactggcgatatctcccgcaccgcgaatcaccaccagctggtgtccggaaggatgagaaggtttcatcatcagcccacccggcgcgttatttttcacccgtaatatttctgccagcacgctgatggcgatctcctgcggcgtttccgcacctatgttgtaaccaacgggcgcatgtaaacgggcaatatgttcttcagccacgcctttctcacgcaattgacgcaggaaaagctgaaccttgcggcgacttgccagcaaccccaaccatgcaatgggctgttcaatgagtttgtcgagggcttcacgatcctgattattcgtggcaatcaggacaaaattatcagggcgaatatccagttcttccactgccgcaccaaacgactcagcatggagaagcgtggttgatggtgggaatagttcaggattgaggctttcgcgataaatatcggcaacggcaatatcaaatcctaatagcgccgcactctgggctatcgcccggttgacatgccccgcgccaatcaacaccagacgtggacgcataccatggacgctgataaatactgacattgcacctccacaatctgacccgacagcatccgcaccgttacgagccatacgtccatggaataatcgcggcttacgttcctgcaatgcctgaagtgactcttcaatcaccttccactcaaccattccgccaccaattgtaccgacgatagaaccatcggcgcgcactaacatttgtgcagaatggcggggagtcgagcctcggctatcaacaatttgcgccatcgcaaacggacaattttgctcttcgagttttgcagcctctgtgaaaatattcataccaacctcaatggatatcctttcagtaacccggaatacccgggccgctaattcacaaatctgcgcgcgattgcaggatgttcttgtatatcgcccagccagattgcctctacgtcgtgttgttgcagcggttgaaggagctcgctttgtgcaatcgcattctcacattgagaaaaacggttaatgaaccagactcgccgacaaccttgcggtacgtttttaaacgccccctgagggtggcgaaccagcgcaacgagatcgctcagttgcaaggttgcatcaggtgttaacccggtaatatcagcaaactgcgaccagcgatggacattttctgtgctcactttcgcgcccaaagtatgtcctcccatcacagcaatcacgcagcaactgcttttgggtatgcaaggttcgtgctcatcaggcgcttttaacggcattccacgcgagccatctgcttcaatgagaattacgtcacactctggtcgttgcaccagtgcatcaatcgcttctggcgtaaatccctgcacttttccctggttcgctttccagctgtgaaaacaaaatgaaatgggggatgtaagagacgcatgaggaagcatggcgggatcacgacagaaaaccacgggccagtgagacgttggcataaacatatgtgtcgtcgtcgtgattaacacacgcctgccgctagcctggagcagttctgccagccaaaaaagcaagctggttttccccccagcaccaacaacagaaatcacagtgggacgtttctgcgcacctaaatcaatgactaatgccgatgggtcaactatacttttcacgagtctttatgacctctctgggataaattatccccaacttaatccatcaggaagtaacgcaattatcaggcgttattagcccctataaataatggaaccactatgtcagccatcgactgtataattaccgctgccggattatcatcaagaatggggcaatggaaaatgatgttcccctgggaacagggaacaattcttgatacaagtatcaaaaatgcgttgcagttttgtagccgaattattttagtcaccggctatcgtggtaatgaactgcacgaacgttatgcgaaccagagcaatatcactattattcacaacccagattatgcgcagggtttactaacatccgtcaaggccgcagtacccgcagtgcaaacagaacattgttttctcacccacggtgacatgccaaccctcaccatcgatatttttagaaaaatctggtcgttacgaaatgatggcgcaatactgccactccataatggcatccccggccatccgattttagtgtcaaaaccatgcctgatgcaggcaatccagcgacccaatgtcaccaatatgcgtcaggcactccttatgggagatcattattccgtcgaaatagaaaatgcagaaataattttagatattgatactccggacgactttattacagcgcaaaaaaggtatactaaaatttagaaaatgtagttaaacgattgcgttcaaatatttaatctctccagcactctttatcataatgataaggaatcactgattttgagaaaagagaaaaagtgataaatgggctgacaataataattttcaggagtgattttaattctcatttggcacctgtgagttcattcacaaaaagcctttaagtttcgagccacctcacatttttttatatttcccgccaaacctggcaagagtggtgcgattgttgctctatccccctaaaccaccggatttctcaacaccggtcactcaatgatatctgtataagctaaggagagggttatgggggatattatgcgtcccattccgtttgaggaacttttgacgcgcatatttgatgaataccaacaacaacgctcaatctttggtattcccgagcaacagttttactcacctgtaaaaggtaaaactgttagcgtcttcggtgaaacctgtgccactcccgtcggccctgccgctggcccgcacacgcagctcgcgcaaaatattgtcacttcctggctgactggcggacgcttcatcgaactaaaaaccgtccaaattcttgaccgcctggagctggaaaagccctgtattgatgccgaagacgaatgctttaacaccgaatggtctaccgaatttaccttgcttaaagcctgggatgaatacctcaaagcctggtttgccctgcaccttctcgaagcgatgttacagccttctgattccggtaaatcgttcatctttaatatgagcgtcggttacaacctcgaaggtattaagcaaccgccgatgcaacagttcatcgacaatatgatggacgcatctgaccatccgaaattcgctcaatatcgcgatacgctgaataaattactccaggatgacgcatttttagcccgccacggattgcaggaaaaacgcgaaaacttgcaagccttacccgctcgcatccccaccagtatggtgcagggcgtcaccctctccaccatgcacggctgtcctccgcatgaaatcgaagccatttgccgctacatgctggaagaaaaagggctcaacacctttgtcaaacttaacccgaccttactggggtacgcgcgtgttcgtgagatcctcgatgtctgcggtttcggttacataggcttaaaagaagagtcatttgatcacgacctcaagctgacgcaagcactggaaatgctggagcgcctgatggtactggcaaaagaaaaatcactcggctttggcgtaaaactgactaacactctcggcaccatcaacaataaaggcgcactgcctggtgaagagatgtatatgtcaggccgtgcgctgttcccgctctccatcaatgttgcagcagttctctctcgcgcctttgacggcaaactgcccatttcttattccggtggtgccagtcagctgactatccgcgatatttttgatacaggtattcgccctattactatggcaaccgacctgctgaaacctggcggctatctgcgcttaagtgcctgcatgcgcgagctggaaggctccgacgcctggggacttgaccatgttgacgtcgaacgactgaacagactggcagcagacgcgttaaccatggaatacacccagaaacactggaagccagaagagcgtattgaagtggcagaagacctgccgctgaccgattgctacgttgccccctgtgttactgcctgcgctatcaagcaagatattccggaatacatccgtctgcttggcgaacaccgctatgccgacgcgctggaactcatctaccaacgcaacgccctacctgccattaccggtcatatttgcgatcaccagtgccaatacaactgtacccgcctggattacgacagtgcgctgaatatccgcgaactgaaaaaagtcgcgctggaaaaaggttgggatgaatataagcaacgctggcacaaacccgccggttctggttcacgccatccggttgccgtgattggtgcaggtccggcgggtctggcagcaggttacttccttgccagagcgggccatccggttacgctgtttgaacgcgaagccaatgctggcggcgtggtgaaaaatatcattcctcagttccgtattcctgcagagttaattcagcacgatatcgattttgttgccgctcacggcgtgaaatttgagtatggctgctcacccgatttaaccgttgaacagttaaaaaatcagggcttccactatgttctgattgccaccggcactgataaaaatagcggtgtgaaactggcgggcgacaaccaaaatgtctggaaatcactccccttcctgcgtgaatacaacaagggtacagcgctcaagctgggcaaacatgtggtcgttgtcggggcgggtaacaccgcaatggactgcgctcgtgcggcgttacgcgttccaggcgtagaaaaagcaacgatcgtttaccgtcgttcactacaagagatgcccgcatggcgcgaagagtatgaagaagcgttgcacgacggcgtagagttccgtttcctgaataatccggaacgtttcgatgctgatggcaccttaaccttgcgcgttatgtcgcttggcgaaccggatgagaaaggtcgtcgccgtccggttgaaaccaacgaaacagtaacactgcatgtagacagcctgatcaccgccattggtgaacagcaggatactgaagccctgaatgcgatgggcgtgccgctggacaaaaacggctggccagacgtcgaccataatggcgaaactcgtctgactgacgtctttatgatcggcgacgtacagcgcggaccatcctccattgtcgctgctgtcggaaccgcgcgtcgggcgaccgatgccatccttagtcgggaaaatatccgttcccaccagaacgataaatactggaacaacgtcaatccagcggaaatctatcaacgtaaaggcgatatctctatcacgctggtgaacagtgacgatcgtgacgcgtttgtcgcccaggaagccgctcgctgcctcgaatgtaactacgtttgcaacaagtgtgtggatgtctgcccgaaccgcgccaacgtctccattgcagtccctggcttccagaatagattccagacgctgcacctcgacgcttactgtaacgaatgcggcaactgcgctcagttctgtccgtggaacggtaaaccatacgaagacaaaatcaccgtcttcagcctggcgcaagactttgataacagcagcaccccaggcttccttgtggaagattgccgggtacgagtacgtctgaataaccaaagctgggtgttaaacatcgacagcgaaggtcagtttaacaacgtaccaccggagctgaacgatatgtgccgcatcatcagccatgtccaccagcatcatcattatctgctgggccgcgtggaggtgtaatcatgttgattctgaagaatgtcaccgcagtgcagttacacccggcgaaagtgcaggaaggcgttgatatcgctatcgaaaatgacgtgattgtcgctatcggcgatgccctgacgcaacgctaccccgatgccagctacaaagagatgcatggtcggattgtgatgccgggaattgtctgctcgcacaaccatttttactcggagctttcccgcggaattatggcaaacatcgccccttgcccggatttcatctcaacgctgaaaaatctctggtggcggctcgatcgcgcccttgatgaagagtcgctctattacagcggactgatttgttccctggaagcgattaagagcggatgtacatcggttatcgatcaccatgcctcgccggcgtatatcggcgggtcgctctccacattgcgcgacgcatttttaaaagttggcctgcgcgcgatgacctgttttgaaactactgaccgtaacaacggcatcaaagagttgcaggaaggtgtagaagaaaacatccgtttcgcccgtttgattgatgaggcgaagaaagcgacaagcgagccgtatctggtggaagcacatatcggtgctcacgcgccgtttaccgtgccggatgccggtctggagatgctgcgtgaagccgtgaaagccacaggccgtggtttgcatattcacgctgcggaagacctttacgacgtttcctacagtcaccactggtacggcaaagacctgctggcacgactggcgcaattcgacctcatcgacagcaaaacgctggtcgctcatgggctgtacttgtcgaaagatgacatcgccctactcaatcagcgcgatgcgttcctggtgcataacgcccgttcaaacatgaacaaccatgtcggctacaaccatcaccttagcgacatccgcaacctggcattgggaacggacggcattggttcggacatgtttgaagagatgaaatttgccttctttaaacatcgcgatgcgggtggtccgctgtggcctgacagttttgccaaagccctgactaacggtaacgaactgatgagccgcaactttggcgcgaaatttgggcttctggaagccggttacaaagctgatttgaccatttgcgattacaactcgccgacgccgctgctggcagacaatatcgccgggcatatcgctttcggtatgggctcaggcagcgttcacagcgtgatggtcaatggtgtgatggtctatgaagaccgtcagtttaacttcgattgcgattccatttatgcacaagccagaaaagccgctgccagtatgtggcgtcggatggatgcgctggcataaatgacagatgccctcttcccgcagggaagagggttaaataaggaaagaagatgattgaacaatttttcaggcccgactctgtcgaacaggcgctggaactgaagcgccgctaccaggatgaagccgtctggttcgccgggggcagcaaactcaatgctacaccaacccgtaccgataaaaagattgccatttccttacaggatctggaactggactgggttgactgggataacggtgcactgcggattggtgcaatgtctcgcttgcagccactgcgtgatgcgcgctttattcctgcagcactgcgtgaagccctcggttttgtttactcacgccatgttcgtaatcagtcgaccattggtggtgaaatcgccgcccggcaggaagagtcagtgctgcttcccgtcctgctagcactggatgctgaactggtttttggcaacggcgaaacgctgtcaatcgaggactacctggcctgcccatgcgatcgcctgctaaccgaaattatcattaaagatccgtatcgcacctgtgcgacccgcaaaattagccgttctcaggcaggtttaaccgtcgtgacggcagccgttgcaatgacagaccacgacggtatgcgaattgcgctggatggcgtcgccagtaaagcactgcgtctgcacgatgtcgaaaaacaaaatctggaaggcaatgcacttgaacaggctgtcgccaacgccattttcccgcaggaagatttgcggggcagcgtggcctataaacgctatatcacgggagttctggtagccgacctgtatgccgactgccaacaggctggggaggaagccgtatgatcatccactttactttaaatggcgcgcctcaggagctaaccgttaatccaggcgaaaacgtgcaaaagctgttgtttaacatgggaatgcactctgtacgcaacagtgatgatggcttcgggtttgccggttctgacgcaataatctttaacggtaatatcgttaacgcgtccttgcttattgccgcacagttagagaaggcagatattcgtaccgcagaatctctgggtaaatggaacgagttaagtctggttcaacaggcaatggttgatgttggcgtggtgcagtctggttataacgatccagctgcagctctgattatcaccgatcttctcgatcgcatcgccgcacctacccgcgaagagatcgacgacgcgctttctggtttgttcagccgcgatgcaggctggcaacaatactatcaggtcattgaactggcggttgcacgtaaaaataatccgcaggccaccattgatatcgctccgactttccgtgacgaccttgacgtcattggcaagcattatcctaaaactgatgccgcgaaaatggtgcaggcgaaaccctgctatgttgaagactgcgtaacggctgacgcctgcgtcattaaaatgttacgtagcccacacgctcacgcactgattactcatctggatgtcagcaaagctgaagccttaccgggcgtcgttcacgttattactcacctgaattgccctgatatctactataccccggggggtcagagcgcaccggaaccgtcaccgcttgaccgccgtatgttcggcaagaaaatgcgtcacgtcggcgatcgtgttgctgcggtcgtcgcagaaagtgaagaaattgcgctcgaagcactgaagctcatcgacgttgaatatgaagtgcttaagccggtaatgtcgatcgacgaagcaatggcggaagatgcgcctgtcgtgcacgat
